United States Patent Application Publication US 2019/0144922 A1 - sequence listing, part 15

SEQ ID NO: 6 - DNA, 5241455 bp, Serratia marcescens (residues 1,747,153-3,494,304 of 5,241,455)
tgttgcatcacgatctaatccctttggtacaagcggatgtttacctgcaagatgacgtttataaagattattatttaaagaaaatcaattggttgaagaacgcggatctgctgctgaccaactcggactatacttcttcggaggtgattgagtggttggatattcccgaaagcaaagtgtgcacgatttcggcggcgaccgaagaacattttgatatcagcgagatttccgctaataatttttctgaattaaaagagaaatatggcattacccgtgatgtcgtactttatgctcctggcggttttgactcccgtaaaaacttcaagaggttgattgaggcttacagcaaattaacgcctgaattgcgtgaaaaaaatcaactggttatcgttagtaagctatcggacagcgatcgcagttatctgcattccatcgcgcgtaatcaacaactgcgtgatgacgagatggttctgactggatatgtatcggaacaggatctggtcgtgttttatcagttggccaagttgtttgtctttgcttcgttgcatgaaggctttggattaccgattctggaggccatgacgtgcggtgcggcgacaatcggttctaacgtcaccagtatcccggaagtgatcggttatgccgatgcgctgtttgatccctattctgttgagtcaataagcgacaagcttcaacaggctttaagcgatgacgttttcctcgctcaattaaagaaacacgctttggagcaatccgccaagttttcgtgggataaggcgggaactatcgccttgtctcgttttgagcggttagttgctgaggccggagatgtggagtttgaatcggtaacgtcatcgcaattgatctccgccgtttcctcgatcaaatgtcgtgaagagccttcggataacgatctgcggtcaaccgctgaggcgatggatagaaatgccaaaagactcgagttgcaaggcattgcgctagagtctctctcttggcgcgttgaaggaccttttgacagctcctatagcctggctttggtaaatcgagaattcgcgcgagcactcagtcgcgacaatgttgacgttctgctgcattcaacggaagggcctggcgactttgctccaaatgaaaccttcctaagtgatgaaagtaatgcggatttgaaggcattccattcgcgtttgcagcagcggagtgagcagcaggttaatgtattgagccgcaatatctatccgccacgtgtcagcaacatggctgcggatgtgaagcttttgcattgctatgcatgggaagaaagtggctttccacaaggttggatcaataatttcaaccgtgaattggatgcgatcctttgcacttcagaacatgtgcgcaaagtattgattgataatggtactaaagttcccgtttttaatgtcgggaatggttgcgagcactgggagcggattcagtcagccaatcctccgcaactgaacgccaaagcattcaaattcctgcatgtttcttcgtgcttcccgcggaagggggttcaggcgatgctggcggcctatggcgccgcttttaccggagaggatgatgtttctctggtcatcaaaactttccctaacccgcacaatgaaattcaggcatggcttacgcaagctcagaagcggcacgtcaattatccccatgtcattattatcgagcaggatatgccggaacaagagctgaaagcgctctatgaacagtgtgatgtcttggtggcggcaagctgtgctgaaggatttggtttgccgattgcggaggcgatgttgagcggtttacccgctatcaccactggttggagcgggcagcttgatttttgcacgcaggaaaattcatggctggttgattatcgttttgaacgcgcgaagacccattttggcctgttttcttcatcatgggtgcatgccgatattgataaactggccgaggcgatggcgcaggcggcggcgactgacaaaaagcaactatcggcaatggcagcaaaagggcgtgaactgatacttagtcagtttacctggagctcggttgcgcagcgatcaaaggctgcggtaggcgaattgcgtaagcattttgacgtcgctcaagtggaaccccggattggctggctctcgacgtggaataccaaatgcggcatcgccacctattcccaacatttggtagctgacatgcccagcgaccaaattgtgatttttgcaccgacagcaaatgatctggtacatgcggacgaaggtaacgttctgaggagttgggttgttggaaaagaagacaactaccttgatgctttagatactcaaattgaaaccctgaatctgaataccttggtcatccagtttaactatggattctttaaccaccgcgagttatctgcctttatcaaaaggcatcaccaggcgggacgggttatcgttatggccatgcattcgacggttgatccgatcgaaaaagagccgtattggaatttccgtttatcagaaatgactgacgcgttgaaaatgtgtgaccgtttgctggttcattctattgctgatatcaaccgcctgaagttgcttggactagtcaataatgtcactctgttcccacatggcgtgattaactatcccgctctggcatcgactgctcatcgtaatctgccgcctttggttgccagctatggtttttgcctgccgcataaagggttgaaggaacttatcgaagccgtggcctatttgaaaaaagcggggaaccctattcgactaaggttggtcaatgcggaataccccgtcagtgaatccaccgctttggttcgtgagcttaaagagactgcggctaatttgaaggttgaagatctggttgagatgcataacgattttcttgatgataaagaaagcttacgtctgctctctgacgccgatctgctggttttcgcgtatcaaaataccggcgaatcggccagtggtgccgttcgctacggcatggcgacgcataaacctgtggcagtgacgccgctcgctatttttgatgatcttggtgacgctgtcttcaaattgaagggaacctccgtagtggatgttgctgaaggtattgcagatattatttctgagattgttaaaaactcttcgagtgcagttgaaacgcaacgacgtgctgatgcgtggtgcgagcagcatgattatcatgccgttgccagacggctagaaaacatgtgtgcgggcttgttaagagcaaaacatttcaaataacctcctctagctatagccttattcaatgcagtaggtgtgatttctactactgcattgaatctactatgttgaaagcatagatattctatggaatgtgactttagatgaaaataattctttccgttgagcctatcaagttcccgttgactggcatagggcgttatacctatgagttggcaaaaggcttgcaaagccacaacgaaattgaagaactaaattttttctccggtacccgttttttatctaacatacctacggcaaaaaatacatctgatagtagtcactggttgaaaaaaattgtgcagagcaattcattggctattgagacctacagattgcttatgccacaactaaaaaagaaggcgctgcgtggctacgaacgttgcctttttcatggacctaattatttcctccctccttttgacggccctgcagtggcaacgtttcatgatctttctccttttaaatgggagcactgtttcgatcctaaaaggaatcgttataccaagaaagaaatgatgaaagcattatcgagggcgaatggtctcatcacggtctcgaactatattcgtaaagagattcatgaatatttcgattatccaattgagaaaatccacacggttcatctggcaagctcgcctgatttttaccctcgtcaggtagaaaacgtatctggagttttaaaaaaatttgatttaagctataaagccttcaccttattcgttggtaccattgagccgaggaagaatattctttcccttattcatgcttatagaaaactgcctgacggattgcgtgcccgttatccattagtcctctccggctataagggatggcgcaatgatgacattatgcaggaaatagagcgaggacagcgtgagggatggcttaagtatctgggatttgcggctgcagaagaattgccattattgtactctgcagccaggctgtttgttttcccatcacactatgaaggctttgggcttccggtattggaagcgatgagctcgggaactccggtgatttgttccaacagttcatctttgccggaaatcgcaggtgatgcggcattaactcactctcctgaggatgtcagcttattaacgcagcttattatcagagggctgacagatgaagcgtggagaaaggatgcaattgcattaggtttgtcacatgcagcaacgttttcctggaaaaattgcactagccaaactttaaacgtttatcaaaaattgactaataatgattaaagtactccatttttataaaacctattatcctgactcatttggcggcattgagcaagtgatataccaactcgctgaaggtggggtagagaagggtatatcgacggatgttttgtccgtaacgcctgcagataaggatagttgcgaaactatttcacagcatacagctcataaagtcagacaagatttcagcattgcatctaacccattttcatttcgtgtcataaagaaatttaaagagctcagcgagcaagcggatatcatccactatcatttcccatggccatacatggatcttgtacacttcctctcgggagtgaataagccgacagtagttagttatcactctgacattatcaggcaaaaaaaccttcttaggttatataagccactgatgcacctgttcttgcgtaaaatagattgcatcgtagcaacatcaccgaactatgtggccaccagtgacgtattggaaacgttcaaaaataaagtctctgtgattccgataggtctggataaagagacatatccggtgccagagccgagccgcttggaaaaatggcagcgtcagctcggccaaccatttttcttatttattggcacgttacgctattataaagggttacatatactgctagaggcggctatcggtgcaaactatcctatcgtgatcgtaggggccgggccgatcgaaagtgaattgcgtgagcaggctcagaacttgggactgaaaaacgttcattttcttggcgcattgccggatgaggataaatcggcactactgacgctgagctatggtattgtatttccgtcacatttacgctcggaagcgtttggcatttcgctactggaaggtgccatgtaccgaaaacccatgatttcaagtgaaatagggacaggaactacctttatcaacgtcaatgatcagacgggactggtgatccctccatcggatccttcggcattgagaaaggcaatggataagctttgggagaaccccaagttggcggagacattcggtaataaggcgtatgaacgctacgaagagatgttcacctccaaacaaatggtcgaggcatacgcgaaaatctacgaatccctgctgggaaggcataataagcccgattgaatggtctggcaggttactgaaaatttagacgagttatgtgacctatcgcaccaatcactacccacccggctcaatcctgagttaacatgtgtgccacatcacaaaacctgctggccgacgttgccggcagggtcatcctcagacaggagttcctaaatgtccaagcaacaaatcggcgttgtcggcatggcggtaatgggccgcaacctcgcgctgaacatcgagagccgtggttacaccgtttccattttcaaccgttctggcgacaaaactgacgaagtgatcgctgagaacccgggcaagaatctggcgccgtattacaccgttgaagagtttgtcgaatcactggaaaaaccgcgccgcatcctgctgatggtgaaagcgggcgaagcaacggataaaaccattgcctcgctgactccgcacctggacaagggcgatatcctgatcgacggcggcaacacctactatcaggacaccatccgtcgtaaccgcgaactgtccgaccagggcttcaacttcatcggcaccggcgtttccggcggtgaagagggcgcgctgaaagggccttccatcatgcctggcggccagaaagaagcttacgagctggtggcgccaatcctggagaaaatcgctgcggttgcggaaggcgagccttgcgtgacctacatcggcgcagacggcgccggccactatgtgaagatggtgcacaacggcatcgaatacggcgacatgcaactgattgccgaagcctattctctgctgaaacaggcgttgaatctgagcaacgagcagctggccgaaaccttcgccgagtggaacaagggtgaactgaacagctacctgatcgacatcaccaaagacatcttcaccaagaaagacgaagaaggtaaatacctggtcgatgtgatcctggacgaagccgccaacaaaggcaccggcaaatggaccagccagagctcgctggatctgggcgaaccgctgtcgctgatcaccgaatcggtattcgcacgctacctgtcctcgctgaaagatcagcgcgttgccgcgtctaaagtgctgaccggcccgaaagtggcgccgttcactggcgacaaagctgaattcatcgagaaagtgcgtcgcgcgctgtatctgggcaaaatcgtgtcctacgcgcagggcttctctcagctgaaagccgcgtctaaagaaaacaactgggatctgcactacggcgaaatcgccaagatcttccgtgccggctgtatcatccgcgcccagttcctgcagaagatcaccgacgcttacgcagcggacgccgatatcgccaacctgctgctggcgccatacttcaagcaaatcgccgacgagtaccagcaggcgctgcgtgacgtggtggcctacgccgtgcagaacggtatccctacgccaaccttctccgccgcgatcgcctactacgacagctaccgttcagcggtgctgccggcgaacctgatccaggcgcagcgcgactacttcggcgcgcacacctacaaacgcaccgacaaggaaggcgtgttccataccgaatggatggaataaccccgcccgttgagcgataaaaaaagccgccgaggttaacgcccggcggcttttttattgcgtgcgagttaacgtcatgcttttttctgatgccgctcgcgcagccggccgatcaccgcgctcagatccagatcctggtcctgcagcagcaccagcaggtgatagatcaggtccgaagcttcgttggtcagctcttcgcgatcgttgaccgtggcggccagcgcggtttccacgccttcctccccgactttctgcgcgatgcgcttggtgccgctggcgtacaggctggcggtgtatgagctgtccgggctggcgtgcttgcgctccgccaacagctgttccaactgatagaggaacgtccagtcgctggcggccggatggaagcagctgctgttgcccaggtggcaggtcgggccgatcgggttggccaataccaacagcgtgtcgttatcgcagtccggcgtgatgctgaccaccttgaggaagtggccggaactttcgcctttggtccacaggcgttgcttggtgcgcgagaagaaggtgacgttgccgctctgctcggtggtcgccagcgcttccggcgtcatgtaacccagcatcagcacttcgccggaaacggcgtgctgcacgatggccggcatcaggccgtcggttttttcccagtccagctggtttctctgttgttctgtcagcacacgcgaatctccacgccttgttcgaccaggaaccttttcagttcgccgatattgatgatttgtttgtggaacaccgatgccgccagggcgccgtcgacgtccgcatcgcggaacgcttccaggaagtgctccatcgtgcccgcgccgccggaggcgatcagcggcactttgcagacctcgcgcacctggcgcagctgctgcagatcgtaaccgttgcgcacgccgtcctggttcatcatgttcagcacgatctcaccggcgccgcggcgctgcacttcctgcacccagtcgagggtttcccactgggtgacgcgggtgcggctctcgtcgccggtatattgattgacgtgatacttgccggtttcactgtcgaaccaggtgtcgatgcccaccacgatgcactgcacgccaaagcgatccgccaggcggctaatcagatcgggatcggccagcgccggcgagttgatcgaaatcttgtcggcgccgaaagacaggatctggctggcgtcctcggcgcttttaatgccgccggcgacgcagaacggaatatcaatcacctccgccacgcgcgacacccagcttttgtccaccacccggccgtcgctcgaggcggtgatatcgtaaaataccagctcgtccgcgccttcttgcgcatagcgctgcgccagcggcacgatgtcgccgatgatttcgtggttgcggaactgcacgcctttcaccacttgcccgtctttaacatccaggcacgggattatccgttttgccagcatgcgatcgcctcctcaacgctaaatttaccttccagcagggcgcgccccacgatcacgccggcaacgccgctgctgcgcagctgggcgatgtcgtccagattgccgatgccgcccgaggcctggaaggccacctgcggataacggcggctgatttcctgatacagcgccacgttggaaccggccagcgtgccgtcgcgcgaaatatcggtgcacagcacgtgtttcagcccgtagggcaggaactgttccaccacctgttcaagcgtggcgtcggagtcttcctgccagccgctgatggccacgcgcttcacgccctgcgcgtcgatgcgcacgtccaacgccagtaccagcgcgtcggcgccgtagcgttcgaaccagctttgcaccaactgcggctgtttcaccgcggtggagccgatcaccacgcgcgtggcgccggcctccagcagggcgctgacgtcttgttcgttgcggatgccgccgccgacctgcaccggcacctcaacccccgccagcagcttgcgcagcagcgggatctggcgcgccgccggatccttggcgccggtcaaatcgaccagatgcagcacctgggcgccctgttgttgatagtcctgcaggcgcagcagcggatcgttgccgtagtcgcgctgttggccgtaatcgccctgatgcaaacgcaccacgttgccgtcgatcaaatccaaagccggaataatcatgctgcctacatctccagaaagtttttcaacagttgcgcgccggccgctccagatcgttctggatgaaactgcacgccgaagaagttgtctttttgcacggcggcggtgaagggctcgccgtaattcgcctgggcgatggtgctggggcatatcggcatcgcatagctgtgaacgaaatagaagtaggcgccgtcatcgatgccgcggaacagatggtggcccgcctgcgcggatacctggttccaacccatgtgcggcagcggcaggccgaagtcggtcatctgcttgaccggcgtatcgatgaggccgagcgtggtcacgccgccgttctcttcgctgctggccgccagcagctgcatgccgaggcaaatgcccagcaccggctgcgtgcaggccctgatcagttcgatcaaatcgcgctcgcgcagctgatccatcgccgcctgcgcagtgccgacgcccggcaggaacagcttgtcggcgcgcagcacgatctccggatcgcggctcacctccggctgataacccaggcgccgcaccgcgtaggtgacggaggccaggttggcgcagccggtatccaaaatcaccacgttcatcacagcactcctttcgaactcggcagggtattgccctcgacgcggatcgcctggcgcagcgtgcggccaaacactttgaacaggctctcgacccggtggtggtcgtttttgcccttggtcttcaggtgcagcgtgcaacccatggtgtaggagagcgaacggaagaagtgctcgaccatttcggtgctgagatcgccgacgcgctgatagttgaactcggccttgtactccaggtgcgggcggccggagatatccagcgcgcagcgcgccagacactcgtccatcggcagcacgaagccgaagcgggcaatgccgcgcttgtcgccgagcgccttgttcaacgcttcgcccaacgccaggccggtgtcctctacggtgtggtgatcgtcgatatacaggtcgcctttgacgtcgatctccatgcggaagccgccgtgggtggcgatctgatccagcatgtgatcgaagaagccgacgccggttttgatcttgctgccgccttcgcgatccagccagacgttgacgtcgatctgcgtctctttggtcacgcgattaacccgcgcgtgacggtcacgcagggtcaactggcgcacgatctctttccagcccagcacgccgcgctggtaacgcagcccctggatgcccatgttttccgccagctgcacatcggtcggccgatcgccgatcacgtaactgtgcgcggtatcgagcacgccgggttcaaggtagcctttcaccagcgcggttttcggcttgcggcagtcgcagttgtccgccggcaggtgcgggcagatcaacacatcggcgaactgaatgccctgcgagctgaggatctgcatcatcaggttgtgcggcggatcgaaggtttcctgcgggaaactggcggtgccgagcccatcctgattggtgatcatcaccagctgatatcccgcctgttgcagcgccagcagggaagggatcacgtccggctcgagcgccagcttgtccaggcgatcgacctggaaatcttccggtggctcggcgatcagcgtgccgtcacggtcgataaagaggattttttggctcacattggctcctggcgagtctggttggcgccgggcagggcggacaaggcgtccaccacgcgttgacattcgtcgcgggtgcctatggtgatgcgcaggcagccggacaacccgggctgtttgttttggtctcgtaagataatgccctgatcccacaagcttttaaacacattacttgaggcggtgaagcgggccagcaggtaattgctgtcgctggcgaaaacctgctcgacgcaggcgcatttttccagctgttgctgcagccagctgcgggtggctgcgatgtcggtgacgcgctggcgcatggtgcgaataccttcttcgctcagcgcctgcgcggcgatatccgccaccggcgtcgagagcgggtaaggggcgatcaccttcagcagcagggcaatcagatcttcattggcgagtgtaaagccgcagcgcaggccggccagcgcaaaggcctttgacagcgtacgcagaatagccaggtgtgggtagtcgctcagccaaccggccaccgaagcctgcgggcaaaactcgatataggcttcgtccaccgcgacgatcgctttgcctttggccagttccagcagactgcgcagagagtccgggtcgatcaggttgccggtcgggttgttcgggctgcagacgtagatcagcttcacgttatccaggctgtccgcgatggccggcagatccagttgccagtcctctttggcggccacggtgcggcgctccacgccaaaggtttcggcgctgacggcgtacatgccgtaggtcggcgggcagaacagaatggcgtctttgcccggctcgcagaaggcgcgtatcagcagctcgatgccctcgtcggcgccgcggctgaccagcacctgctctttcttcaccccggcataggcggcgtagcgttcgatcacctgcgccggctggcactccggatagcggttgaaggtttgcgcggtcagctggaattccggggcgatcgggtattcgttggcgttcagccatacgtcgcccttgccgccgaggcggcgcgccgattgataaggggtcagctcgcgaacgttggcgcgcgccagtttttcgatgctcatgcttgctccttcagggcggcgacgcgcagggtcacggcgttcttgtgggcgatcagctgctcggcggcagccagcgtctcgatggtggcggccaggttgctgaagccctgcggcgtcagctcctgcaccgtcatgcgtttttggaaatcggccagcccaaggctggagcaggtggcggtgtagccgtaggtcggcagcacgtggttggtgccggaggcgtaatcgccggcggattccggcgaccagtcgccgaggaacaccgaaccggcgctggtgatgccgtccaccagttcgcgcgcattgcgggtctgaataatcaggtgctccgggccgtagcggttgctgatcgccacgcactcagccagatcgcgcgctacgatcaggcggctgctcgccagcgcctgacgggcggtctcggcgcgtggcagctcggccagctggctttccaccgcttcggccaccgcctgcgccattgccgcgtccggcgtcagcaggatcacctgcgaatccgggccgtgttcggcctgcgacagcagatcggaagcgacgaacgccggagtggcgccggcgtcggcgatcaccagcacctccgaagggccggccggcatgtcgatggccgcgccatcaaggcgctgactgacctgccgcttggcttcggtcacgaaggcgttgcccggcccgaagatcttcgccacgcgcggcacgctctcggtgccgaacgccagggcagcgatcgcctgcgcgcccccgacctgaaacacttcctgcacgccgcacagctgagccgcatacaggatctcatcggcgatcggcggcggtgagcacagcaccacccggcggcagccggcgatgcgtgccggcgtcgccagcatcagcacggtggagaacagcggcgccgatccgccgggaatatacaggccgaccgagtcgatggggcgggtcacctgttggcagcgcacgcccggctgcgtttcgacgtccaccggcggcagccgctgcgcgttgtggaaggtttccacgttggcgacggccaccgccatcgcctgtttgatgtcgtcgcccaaccgcgcggcggcggcggcgatctgctcggcgctgacgcgcagcgccgagacttccgccttgtcgaaacgggcgctgtagtcgcgcagcgcccgatcgccgttggccttcacgttgtcgaggatctcgctcaccgtgcgggtgatgctgtcggaggcggcgatggccgggcgcatcagcagctcggcctggcgttcggcgctgctggtcgcccaatcgatcggcgtgttgaaggtcgacatggcgttactccatcatcttttcaatcggcagtaccagaatcgagctggcgccgagcgctttcagtttttccatggtttcccagaacagggtttcgctgctcaccatgtgcatcgccacgcggttctgcgcgccggccagcggcagaatggtcgggcgctcggcgcccggcaacagcgcgacgatctcgtccagtttctcgctcggcgcgtgcagcatgatgtatttggattcacgcgcctggatcacgccctgaatgcgggtcatcaggcgatcgatcagctgctgtttggcttccggcatttcgccgtcgcgctggatcaggcaagccttggagcggtagatcacttcgacttcacgcaggccgttggcctccagcgtggcgccggttgagaccaggtcgcagatggcgtcggccagaccggcgcgcggcgccacttccaccgagccgttcagcaggcaagatttgaagcgcacgccctgcttgtcgaggtattgcttcagcaggtgcgggtaagaggtggcgatgcgggcgtcctgcaggctttgcgggccggcgtattcggcatcgagcggggtggccagcgacaggcggcagccgccgaaatcgaggcggcgcagcgtgaagtaacgcgggtcttcgccctgggcgcggcggctgagcagctcttcttccagcacgttttcgccgatgatgccgagatcgaccacgccgtccatcaccaggcccggaatatcgtcgtcgcgcacgcgcaggatatcgatcggcatgttctcggcgaaggcgatcagacgctgctgctgcaggttgatcttgatgccgcagcgcgccagcagttcctgggattcatcgctcaggcggcccgacttctgcattgcgatccgtaaacgtgtcttgtccagcatggtaacctctgtttaatctgtaattttatgaatttattgtaaaaactattctttctgtctgtacggagccaaaaaaaaaccctcggaagaaatcttccgagggctctctcttgcgttctgcgcgccactggaagattaacaaaccgtcttccagcactcatcgcctgaaagactagtcagggtgatggtgatgatggtggttgaactgaacgcgtgtcatggtgtttttctctaatcaaaagccggtaaaaaccgtatgccaattaagctaaactatccgctgtccaccgcgcaacccttttttaacgtcataaatttaatttattgaaacaggttaggttattagccacagacagctttacctgaccttaagccgggcagattgtatcgccgtgcgcagtggcgtagccttaggggtagggcgctgcgatcttcaggagaggaagaggatgaaaaaggtagccattattggtttgggttggctgggcatgccgttggcgctgtcgctgatggggcgcgggtatgacgtggtcggtagcaaaaccacgccggacggcgtcgaggccgcgcgcatgagcggcatcgaatgctaccaactggaactgacgccggagctggtgtgcgatccggacgatctggaatcgctgctgcgcgtggatgcgttggtggtgacactgcccgctcgccgcaccgtcgaaggcagcgaaaactatttcaatgcggtgcgtatgctggtggacagcgcgatggcctttggcgtgccgcgggtgatcttcaccagttccacctcggtgtacggcgaaaccgcaggcacgctgcgcgaagagtcgccgttgcggccggtctcgccgtcagggcgggtgttggccgagctggaacgttggctgcatgaattgccgaacacctcggtggacattctgcgcctggcggggctggtgggcgccgatcgtcaccccggccgcttcctggcgggcaagctcgacgtgaagggcggttcgcagggggtgaatctggtgcaccaggacgacgtcatcgccgccatccagctgttgctgaagctgccgaagggcggccacgtgtacaacctgtgcgcgccgcgtcatccggccaagcgcgaattttatccggcgctggccgagcagttgcatctggagccgccgcagttcgccgacgaggcggagcaggacgagcggctggtggacggcaaccgcatctgcaacgagctgggttttgaataccagtatcccgatccggcgcgcatgccggtcagttaacgtccgtcaggccccgcgcatgcggggctttttttcgccggcgcgcgccaaatcctccagcagcgcgttcaacgcctcgttgggctggacggggcggctgaccaggctaagcgtggcgcgataagagagcgccgtgccgcccaactgccgcagcagcccctgttccacccagcgcgccgcgtagtgggtgggcagatagccaagacaggtaccgctcagcaccagatgggcgacgctttccatatggtgagccaccgccgccaagtgaggcggcgcgatcgggcacagctgctgcgccagcaggtagccgcgcttgacccagcgcgcgttttcaatctgctcgcgctcggggtcttccaccgcgaacagcgggtgatccgtgctgcagtagatcgcctgtatttcctccagccacggctgataacgtaactcctccagctgttggccgaagtaaccgatgcccagatcgagctgctggtgcagcagcccttgctcaatctcgttcggcgaacagatgcggcactgcaattgcacgtcctgatggcgccgctgaaagtgcttgatggcctggctgaacggattgcccggcagcgaaaccagattgtccaccagaccgatttgcagatcgccggtcagcaggccgttcagcgactggctgacccgggtgaagtcgcgggcggcgttgaacagcgaacggcaggcgatcagcatgcgttcgcccttgggcgtcagccggaagccggagcgcccgcgttggcacaggcgaaaacccagtcgggtttccaacgaggccagatgggtgctgatggtggattggttcatcagcagcgcttcctgcgcggcgctgacgccctgggcttccgctaccgcgacgaacacccgcagcagtttcagatcgatatcgcttaggttggtgagcattccccctccgcagaacgtcggccggttaacccatttttaacatcgaagaaataggtgcggcgctgaagatatggcctttcttatggcatgaggttgaaataaaaatcaatacttcaataggttagttgcatcgcgttttccgatgtttacatgcaaaagcgggaatggtagccgaggtggccaccggggtagcctgcgaatgttgctcaaatgtttcaatccatcgcagataacgacaaggaaacgccatgctgaaccaaccccaaagcggtaacgatatgccgcgctttgccggcctccccaccatgatgcgcctgcccgcggcagaacaggcgcgcggtctggacgccgcctttgtcggcattccgctcgatatcggcacctccaaccgcagcggcactcgctatggcccgcgccagatccgccaggaatcggtgatgatccgtccttacaacatgggcaccggctctgcgccgtttgaacggctgcaggtggccgatctgggggatgtcgccatcaacccctacagcctggcggacagcgtgcagcgcatcgaggcggcttaccacgagatcctggcgcacggctgcacgccgttgacgctcggcggcgatcacaccctgacgctgccggtgctgcgcgccgtcgcccgtcgtcatggcccggtcgggctgatccacgtcgatgcgcattccgataccaacgaggagatgttcggcgaacagctggcgcacggcaccaccttccgccgcgcgtttgaggaggggctgctggcgccggaaaaagtggtgcagattggcctgcgcggcagcggctatgcggcggatgacttcgactggtcacgccgccagggctttcgtgtggtgccggctgaggcctgctggcaccggtcgctgacgccgctgatggcggagatccgcgaacagatgggcgaagcgccggtttatctcagcttcgatatcgacgggctggatccggccttcgcaccgggcaccggcacgccggaggtcggcgggctgtcggtctggcaagggctggagatcgtgcgcggctgtcatggactgaacctggtcggcggcgacgtggtggaggtgtcgccgccttacgatcgctccggtaacaccgcgctgctggcggccaacctgctgtttgaaatgttgtgtgtgctgccggcccgctgaggccggcgcactgactctaccggcggagcggttgcgtcggggcccctgataacaataactacggagtggaggtacccatgaatctcgatctgctggtcgtggtgttttactttctggtgataggcgcggtggggtggatgggcattcgccgcgccaattccaaagaggcgtatctggtggccgggcgcaacctggggccggggctgtatctgggcacgctgtcggcggtggtgctcggcggcgcgtcgaccatcggcagcgtcaagctcggctacacctacggcatctccggcgtctggctgtgcggcgcgctggggctgggcattgtggtgctgagtctggtgctggccaagccgctgctcaaactgaagctgtataccgtcagccaggtgctgtcgcggcgctatcacccggcggcgcgggtcaccagcggcgcgatcatgctggcgtatgacctgatggtggcggtgacctcgatcatcgccatcggcagcgtgatgcaggtgatgttcggcctgtcgttcagcgcgtctatcctgctcggcggcgggctggtggtgctgtattcgacgctgggcggcatgtggtcgctgacgctgaccgacatcattcagttcatcatcatgaccgtcggcatgatgctggtgctgatgccgatgagcatcgtcaaggccggcggctgggaggcgttcaccagcctgctgcccgccggttactaccagctgtcgtcgatcgggctggacaccattctggtgttcttcctgatctacttcttcggcattctgatcggccaggacatctggcagcgggtgttcagcgcccgcagcgccaatgtggcgcgcttcgccgggctgggggcgggcgtctattgcgtgctgtacggcgtgaccggcgcgctgataggcatggccggcaagatcgtgctgccgtcgctcagcaacaccgacggcaccttcgccgccatcgcgcaggcggtgttgccggtcggcgtcagcgggctggtggccgccgcggccctggcggcgctgatgtccaccgccagcgcctgcctgttggcgtcttcgaccatcgcgctggaggacgtgctgccggccatccgccgtaaaccttccggcgggctggccgccgggcgcttcaccacgcttttcatgggcgcggtcatgctggggctggcgtttgtggtgcgtgacgtactggcggcgctgacgctggcttacaacctgttggtgggcggcatgctgatcccgctggtgggggcgatcttctggccgcgcgccaccagcgttggggccatcgccagcatgctgaccggcagcctgtgcgtggtggggctgatggtctggcacggcatcgacgccaacagcccgatctacggcggtctgctgggcggcggcgtcgccttcgtgctgggcagcctgctgagccgcccgacgccgcagctgcaggcgcaaactgaacgctgaggcgcgatccgggcttttatcacggcgcctttactgatttactgaggagcagggcgcatcgccgccctgttggtttaacggtgagggtaaggagagggtgagtcatgggtaaaatcagcgtcgcatgctgccagttagcgctgcgggtaggggaagcagagcataatcgggcgcagtccgctcaggcgatccgtcatgcggcgcagcgcggcgccaacgtcatcgtgttgccggagttggtgaacagcggctatgtattgcgcgataaggcggaggcgtgggcgttggccgagaccgaagacgggcctagcctcagcctgtggggggccctggcgcgtgagttggatgtggcgatcgtcgccggtttctgcgagcggctgcccgatggtggggtggccaacagcgcggcattgatcgatgcgcagggcgtgagggcgatttatcgcaaggcccacctgtggcatgaggagagcacgatctttacccccggcgatcggccgccaccggtcgtcgagacccgctttggccggttggcggtgatgatctgctacgatcttgaattccccgaatgggtgcggctgccggcgctggccggcgctcagctgctgtgcgcaccggttaactggccgcaggcgccgcgtccgcagggcgaacggccggcggagatggtgaaggcgcaggccaacgccgccgtcaatcggctgttcatcgcggtgtgcgatcgctgcgaaacggagcgcggcgttgcgtggatcggcggttcggtgatcgtcgatgccgatggctatccgttgacgcagagcctgacaggcgaaggcatggcgctggcggaaatggatatcagtatggctgatgacaagcgcatcggccgctacaatcatgtgcatcgcgatcggcggccgatgctgtattgaagcggcggggcagtcggcggatccggctgccccgccgatcgtttctccggcggaaaaatccgccgttttggcgcttacagccagcctgatttcttcagcttctgatacaggaaaatacagccgacggcggtcgcccccagcgtggcgtgataggcccacgggaatttcaactccggcatgtcggcgaagttcatcccgtacaggctgaagatcaccgtcgggatagccaaaatcgccccccaccccgccagccgtttcaccacttcgttttgtttgaccgtcaccagcgccagattgacgtgcatggcgttggtcagcatttcgcgcatgtcgtcgatgttgctgaccacctgatgcgcgtgatcctgcacgtcgcgcacgtaggcgcgcagctctttcgggatcacttcttcgtgcagacggatcagctggttgcagatttcatccatcggcagcgcggcgttgcgcagcgccagcaggtggcggcgcagagtatagacgttctcgatcgccgcctgatcgaactccgactgaaacatgttggcttcgatgttctcgatggtgctctcgaagcgcgttaccacgctgcggtagttatccaccacgaagtccaacaccgaatagagggcgaagcccggcccgcggcacatctgcttgtggttctcttccgccttggcgcggatcggcgcgtagctgggtgaggcgccgtggcgcaccgtcaccagaaagtttttgccgacgaagaagtgggtttcgccgtattcgatttcgtcgtgctcgccccactgcgcggttttcaccacgatgaacagcgagtcgccgtaggtctccagcttcggccgctggtgcgcacacagcgcgtcttcgatcgccaaatcgtgcaggccgaactcctcctgcaccttgcgcataaacgccggttccggctgccgcaaccccagccagacgaaggtgtccggttgtttaaccacctcgctgatatcgtcgatggtcacttcgcccagccgttggccggctttgtacgccacacagttcaccaccatgcttttgctgtccatctgtccatccatcaatcagtcagggttttggtaagaaaatagcactcatgttccaccggatactctttcagcgtcatttgcagctgatagccgagcttttcgtagaaaggtcgcgcctggaagctgaaggtgtcgagacgggcgtagcggcagccgcgcgcctgcgcctcgtgctcggcggcgcgcatcagccggccgccgaggccgctgccgcgctgggtatccgccacccacagccactcgacgctcagccagttgccccaggtttcggcggtcagcccgccgatcaccgtgccggcctcgtcgcgcgcatagacgctgagcggcttgcggtggctggcgtcgatatgcggctggttgtaagcgcgcaggccttgcctgatcgcatcgagggtatgttcgtcaatcgcgtcggtaacggtaatgtccatttttcctcctgggttatggattaacttaagcacactgcggctaaaagacaacccgttgaaatgtaatgtaaacacccattacgacgggctgggctacactaaacgggtcatttcatcttcaggaggacgccatgccccgattgactctgctggccggtttgctgctgtgcagcggcctgctgcacgccgcgccgacgatcagccaattgcaggacggcctggaacacccatggtcgctggccttcttgccggcggaacaaggcttgcttatcaccgaacggcccggacggctgcggctgtggctgcagggcaagggcctgtcgccgccgatcgccggcgtgccgcaggtctacgccgaggggcagggcggcctgctggaggtgttgccggcccccgacttcagcgccagtcgccgggtatatctcagcttcgccgaaccgggcgagggcggcaaagccggcacggcggtcggctatggccgcctgagcgacgatagcgcgcggttggaaaactttaaggtgatcttccgtcagcaacccaagctgtcggtcggcaatcactttggcggcaagctggcgttcgatcggcagggctacctgtttatcgcgctgggtgaaaacaaccagcggccgacggcgcaggagaccgacaaactgcagggcaagctggtgcggctgaccgccgagggcgcggtaccgccggacaacccctgggtcggccaggcaggtaaacgcccggaggtttggtcctacggccaccgcaatccgcaagggttggcgctgaatccgtggagcggcgcgatctgggagcatgaacacggtccgcgcggcggcgatgagctcaatatcccgctgccgggtaaaaactacggctggccgctggccacctatggcatcaactattccggccaaccgataccggaggccaaaggggaacgggtgcccggcaccgaacagccgctgcactattggcgggtttcgcccggcctcagcggcatggcgttttatgacgggcagcgtttccccgcctggcggcattcgctgttcatcggcgcactggcgcaaaaggaactgattcgcctgacgctggagggcgacaaagtggtggcggaagagcggctgttgggcgatcgcggcgaacgcatccgcgaggtgcgcagcgggccggatggctacctgtatctgctgacggacgaacgggacggcaagctgctgaaggtcggggcgtcgtaacgccccgcacgcgtcaggtgagtgcgctcatcacgccgcgctggtaggccgggcgtgcgtgcagctgctgataccagcgctccatgttcggccgtgggcggcgagcgatcggcatttcgaaccaggcgtaggcgaagctgccgagcgggatatcgccgaaaccgaacgcgccgccggagaggtaaggctggtgcgccagcgtctgttcgatgacgtcgaagtgtttttccagcgtggcgatcgccgcttcgattttcgccatgtcgcgcaactctggcgcagtgcggatcaggccccaaaagacgatggtgaaggccggaacgatggtcgaggtggtccagtccatccatttctcggcggcggcgcgcgcctgcagatcttgcggatagaacgtcgcgtcgccgaatttcgccgccaggtagcgcacgatggtgttggactcccacagcacgaagtcatcgtcctgcagtaacggcaccaggccgttcgggttcagcgcgcggtaactctcttcgttgaccttgccaaacgccccgccggcgttgatgtgggtatagctcagccccagttcggcggcgcaccacagcaccttcctgacgttgttcgaattctcacgaccccaaatggtcagcatgggataactccgttagcggattaaagacccttaatacctacgccacaatgcgctttttgtcacaccgcagggcattttttgtctgccgctcagcgttcccagcggcacacttcccagccgtgctccgccgccagcgcgctcagttcgctgtcgggattgatcaccgtggcgctgtcgacgaattgcagcatcgccttgtcgttgagagagtcgctgtagccgtggctgtgctcgaacttcaggtgcgggtggtgcgccagccagtgctgcaggcggatcaccttgccctgttgataggtcatggtgccgtaggtgttgccggtgaagcggccgtcgctgatttccacgccgatcgccagcgcgtcgtcggcgccgagctgttcggcgatcggcgccaccaggtgttcgccggtggcggagatcaccagaatgcagtcgccgcgctcgcggtgccactgcaggcgttcacgggcggcgggatagacgcgcggcaggatgtcgcgccggatgtagcgttgcacccagccggccacggtttgcacgctcaggccggtcagcggcgccagcgtggcctgcatgtagtcctccatcgacagcttgccctgataatagagctgcatcagctgctgctcctgcagttccagctccgccggcgcgaacccctggccgaccagccagcggatccacaggctggcgctgtcatcgtcaatcagggtttcatccaggtcgaataaggctaaatccatcagtatttctccggcaggcagggtatgaggtcgtttacaggatagcggatagcgcacgtcgccagccagcggcgtcggcgaaattgcgcagagcataagaaacattgatgacggttttgcgacagtttgttgaacgtttgcataacttagaacgcaacaatattggccgccccggcgagcgcggtggtaactatggggcaaatgcagccacccgctggggagggtcaatgttgattattcgcctgtacggcagcccgatcgtaatcggggaagaagaggaaccgcatgatgacgcatctgacgacgctgaagacgttgccgctgctggatctttcgcagcttgacggtgatgcgcgccggcggcgcgcttttcttgacgatttgcgcgcggcggcgcgcgacgtcggtttcttctatctgcgcggtcacggcgtggacggcgcgttgaatgcgcggttgcagcacgccgcgcgacaatttttcgccctgccggaagccgacaagctggcggtgcagatggtgcattcgccgcactttcgcggttacaaccgggcggcggcggaactcacgcgcgggcagcctgactggcgcgagcagttcgatatcggcgctgaacgcccggcgctgacgctggctgacgacacgccgcgctgggcgcgtctgcaggggccaaaccagtggccggcggtgctgccggcgctgaaaccgctgctgctggagtggcaacaggcgatgaccgccatgtcgctgcggctgctgcgcgctttcgcattggcactttcgctgccggagcaggctttcgatcgcttatacggcgagaagcccaacgagcacatcaaactgatccgctacccggggcgggacgccaccgccagcgcacagggcgtcggcgcgcacaaggactccggttttctcagcttcctgctgcaggacgcgcaaaaagggctgcaggtggaggtcagcgaggggcaatggatagacgcgcagccgcgtgaagataccttcgtagtgaacatcggcgagctgctggagctggcgaccaacggctatctgcgcgccacggtgcaccgggtggaaacgccgccggcggggagtgacagattatcgatcgcgttcttcctcggcgcgcgtctggacgcggtggtgccgctgtaccaactgccgccgcagctggcggcgcaggcgcgcggcccggccagcgatccgctcaatccgctgctgcgcgatgtggggtataactacctgaaaggccgcatccgctctcaccccgatgtggcacaccgtttttatcaggacgtcatcggcctctgaacgccgggcgtaaaaaagcccggcgcgtcggccgggctgatcgagcgctgatgcggcgattattccgccagcgcctgctgcagatcggcgatcagatcttccacatcctcaatccccaccgacaggcgcaccagctgcggcgtgatgccggttgccaggcgctgttccagcggaatggaggcgtgcgtcatgctgaacggctggctgatcaggctttccacgccgcccaggctttccgccagggtgaacaggcgcgaacgctggatgacccggcgcgcataggcgtcgtcgcctttcagccgtaccgagatcatgccgccgaagcgcgtcatctggcgcgccgccagctcgtgctgcgggtggctcggcaggccgggatagtagacgttttccacctgcggctggctctccagccactgggcgatgcgcagcgcgctgtcgctgtgacgctgcatgcgcagcgccagggtgcggacgccgcgcagcgtcaggaagctgctgaacggatcgagaatgccgccgaccgcgttttgcaggaaaccgagctgttccgccagcgccgggttatcgcccaccgccgcgacgccggccaccacgtcggagtggccgttgaggtatttggtggcggagtgcaccaccacgtcaaagcccagatccagcgggcgttgcagatacggcgaggcgaaggtgttgtccgccacgctgatgagctggtgctttttggcgatcgcggcgatggcgctcagatccgccagcttgagcagcgggttggtcggcgtttcgacccagatcattttagtgtccggctcgatcgcctgttccagcccggcgagatccgccggcgccacgtaggtgacgcgcaggccggcggtgcggctgcgcactttttccagcaggcgataggtgccgccgtacaggtcgtccaccgcgatcaggtggctgtctttatcgagcagctccagcaccgtggagcaggccgccaggccggaggcgaaggcgtaaccgcggctgccgccttccagttcggcgatggcgctttccagcgcggtgcgcgtcgggttggcgctgcgggaatactcatagccggtatgctcgcctggcgccggttgggcgtaggtagaggtggcgtaaatcgccggcatcactgcgccggtcgcgtccggggtgtaaccggcgtgaacggtcaacgtatcaaacttggccataatgggtccttattaacgtaatttttggcgccaggcgttaagcacgtctgtgcgggtaatcaggccgaggaagcgctcgccgtcgagcaccaccgcgacgtggccatggttgaaggtggcctgtaattcctcgtagccggcttccttttgcagcgtatgaacctgtttggtcatcgcgctgccggccggcaggctgaagtgggcggcgtcggcctggacggcgttcagcagatcccactcatcgatcagaccgaccacccgatcgccttccagcaccggcagctgcgagatgtcgtacagccgcatgcgggcgtgcacgatcgccaacgtgtcgtccggcgcggcggaaacggcgacgccctcgtcgtggcggtaggcgatcagatcgcgcagatcgccgtgttgtggcttgctcagcaggccctgttccagcatccagtggtcgttatacattttagacaggtatttgttgccgctgtcgcagacgaaggtcactacccgcttgggttcggtctgtgcgcggcagtaacgcagggcggcggccagcagggtgccggtggacgatcccgccagcacgccttccttgcgcagcagctcgcgcgcggtggtgaaggcttcggcgtcgccgatgcggtaagcattgcgcacctggtcaaagtcgctgagcggcgggacgaagtcttcgccgataccttccaccagccaactgccggcttcgccgatatggccgtggtcgagatagtccgccagtattgaacccgcagggtcggccagcacgaattccgtctgcgacgaaacctcggcgaaatagcggctcagcccgcccagcgtgccgccggagccgacgccgaccacgatggcgtccacgtcatgctccatctgccgccacagttcgggcgcggtggtggtggtatgggccgccgggttggccggattattgaactggtcgatataaaaagcgccggggatctcttccgccaggcgtttggcgtaatcctggtagtaagccggatgccctttgccgacgtccgaacgggtcagcagcacttccacccccagcgcgcgcaggtggaagatcttctcgcggctcatcttgtccggcaccaccagcagcagcttatagcctttcaatgccgccaccagcgccaaccccaggccggtattgccggcagtggcttcgatgatggtgccgcccggctgcagtttgccatcgcgctcggcctgctcgatcatcgacagcgccacgcggtctttgatcgaaccgccgggattttggttctccagcttgacgaacagccggcatgggccggtatcgaactgggtcagctccagcatcggggtattgccaatcatctcgatgacggaatgggggatcgccatgactcatctccaggattattcggtataaaagtcgttgtgcggatgatagcgctgaggataagcgctttaaaaagaacaaatagcggttctatatgccattatggaatatattaatcttttttggacgtatggatgcgcagatgtttagcggtgcagatgcttggccgtgtagccgtgggtagatgcgaaaatgcgcgtcgcgatgcttttttgaacgataagtgcgtgcctgcgtacagttatgtaaaaatgctgaaaattcacgctaaaccctgcaaaaataagataaatcacataaactcacagcaagggcattttcggtgcgttgcgttacccattacgggcgccgcaaggggttgcggccggcacgcgcgcaccgggccactctcgctggttggcttaaaacgtgaacatgtttgaaagttaacgctatttcaatggttttgaatggacactctggcgacgtcatgatgaaaaaaaacttatccacttccctgaaaaaactgaccttcagcgtaggcatcctgttgctggccgccccggccgtgcacgcggccgagccgccggcgccgccgcaggtagacgccaaggccttcattctgatggattacaacagcggtaaggtgctgaccgaaggcaatgccgatacgcgtctcgatcccgccagcctgaccaagatcatgtccagctacgtgatcggccaggcgatcaaggccggcaagatcaagccggaagacatggtcaccgtcggcaaagacgcctgggcgcccggtaacccggcgctgcgcggctcttcgctgatgttcatcaagccgggcgatcaggtgccggtgctggaactgaataagggcatcgtgatccagtccggcaacgacgccagcatcgcgctggcggactacgtggcgggcagccaggattcgttcgttggcctgatgaacaactacgccaaatctctggggctgcagaatacccacttcctgacggtgcatggtctggatgcggaagggcagtacagcaccgcgcgcgacatggcgctgctgagccaggcgttgatccgcgacgtgccggacgaatacgcgctgcataaagagaaagagttcacctttaacaagatccgccagattaaccgcaaccgtctgctgtggagcagcaacctgaacgtcgacggcatcaagaccggttacaccagcggcgccggccacaacctggtggcgtccgccaccgacggcccgatgcgtctgatctcggtggttttaggcgcgccgagcgatcgcgtgcgctttagcgaaagcgaaaagctgctgacctggggcttccgcttctatgaaaccgcgacgccgatcaaggccgataagccgttcgtcacccagaaagtgtggttcggcgacgtcagcgaagtgccgctcggcgtggcgaaagacgcctcggtcaccattccgaaagggcagatgaaaaacctgaaggccagctacaagctgacccaaccgacgctggaagcgccgctggcgaaaaaccaggtggtcggcaccatcgatttccagctggacggcaaaaccatcgagcagcacccgctggtggcgatgcaagaggtaaaagagggcaacttcttcagccgcatctgggatatggtgatgatgaagctgagccagtggttcggcgggatcttcggctgaatgccctgacaccgctgccgcatcgtcgcgtgcggttcctgaaaaagccgcaaccttccgttgcggctttttcattttcagcatccgtggcgtttcagaaatagtccaccagcatggtggctccgctggagaagtcaccttccgccagggtgacggcgctgtttttcaccggcaccgcatcaagcgtcggcggattggcgtaatcgatgttcagcggcgtattgatggcgaaagccttgccgttggccagcagtttgatgcccagcccattgacgctgctgttcaacacgctgctgtcaaaggccgccgcgctgcccatgatcttcattttcagctggcggctgttatccagaaactcacacttgatgctgtaatcgatgcgttgcatatagcgattaccgtcgatacgtttgatgccgaccttgccaaagtcgatatcgatggtgcgcccgtcgttgatcacgcaaggcggaggcgccaccacggtggcggtgatactgaccttggtgccctggtcggcggcctggggggcggcgctgatcacacccagcgtaaacagcagagcgcaacgcgttttcctcgtcatgttcattctggctcccgtctcaaggtgcgctgaagatcagcgtggccgagcctgacatcggaccggtggcgatgctggtgtaaggcacattgttcttcactggcacaaaggtgacggtgtcgttgcccagcccgttgacgatgcgcgttctgaacgtattgttgggtttcaccaccgcgccattgtgcaccatggctacgccgacattaggattggaggtcttgatgaaatcgctggagaagccgctggcatcgctgaccatgcgaaccaaaatgtcttgtgtcgcgctctgatcgtcacaccggtagctgagcgccttgtcctgtttgatttgggcgtcgatggcgctctgcgtgagaaagtcctggcggatctgaccgaagtcgacgttaatctgctggccgttgttgatagtgcaactggtggtgacgaagtaggcgtcgttgtcggcgatcaggcgccaccggtaaggcccacattttgggcaacctgactggtcatttttttgttcaaagttgatttggccgatgacgtcgcccttgttcaccttgatatcctgcgtcggcgaacggttgagcacgatgtaaaccctgatggaaatgctggcactgtttaggccggtaatcgtcatcacctggatacctgattggatcggggataagtagtcggtgccgttgattgtcataccgttggcaagcgtaccgaaaatggcggtgttcatcgtcaacgccgggctgccggtgagtaaaatatctttccagttggcgacgtcgtttttacaggtcacctggctgacgttgacgatttcatttttcccgatggacaattcagggcctatctttaccctgacgtcgaccggcgtcattgaaccaccctgaccaatgttcccgccgtcggaggttttacaggtaaatgcattggcgttaccaatgaggacgaaaaaagataatgccaggcagtgttgtaaaaataggatggttgtttttctcacaataatatcccgattatatagtgtcatttggctaggtgccgccacgaaatagggctaattaggctgactgtgccggcgttattccgttaaatgagaataaggcgcatctattcctggtatttccttgttgtcagctggcagtagggcggtggggtaccacctcaacgagttgttgatggagccgtccgttacgagcacttcttgtttggcgacgagttccaacagcagtagccgggcgcggtaaacgccgacgttgacggcgttggccagttgccgggtagacaaccacagatgctgaggtggcagtccggtgtcgggacattgacggggcgactgcgcgaataatgtttgcagcagatcgtgctgcaattgccgtatttccttttgttttggagataacgcttccatagcacttcctctgtatttcgattgctgtattcctaagaaaaaacaaagtttcactgcctaccaataacgaggtaaatcgcgaatcaagaaaaatcctatctatttatcaggattgaaaaaaaggggtttcccactccgtttctacctgttttcaggctgggggagtgtcacgcagaaacctaaagttttggtttattatattcacaaatggcggctttgcgatctgattaattgtgaaacagagaaaaacaggatattgcactataaaagtattttttacgatctatgagcctaaaaataacactaaattaactttaattaggaaataaattgcgaatgttcgtcttgatcaaaaaaagactttttttgctggtgggcatttgccagaatattcaccgccagacaagaagggcggattagaaagtattggtctctgcttgttgtgatttcgtttatttttatatgacgaattcattaatgggtagaccgctgcagacttgccgttatcgacgtatctattgtcggtttctttggttttggcagttaaccaaccagcaagatgctaaagaatcagggctgcgcatatataagcgcgagcagatttcctgttgctctttttcttgattggaatatgcattttttcttataaggaatataggttctatgaaacttaacaaaatcatgatggctgcagtgattgcatttggcgcaagttcttttgcacaggcagccgatcagggacacggtaaagtgaccttcacgggttctattattgatgcgccatgctctattgcacccgagtcgatcgatcagaccgtagatctgggccaggtttctaacgtggcgttgaaaaacggcggcaaatccaacccgcgtccgtttgaaatcaagctggagcagtgtgataccactacgctgaaaaccgttaaaaccaccttcagcggcattgcgtcgtcaaccaacaaagatctgttgggtatcgcggggaccgccagcggcgccggcgtagcaatcacttatggcggccagccgatcaaactgggtcaggcgactgcggcacagacgctgaatactggcaacaacagcctgaacttcgccgcttacctgcagggtgaaggcgcctccgcagccatcgttccgggcgatttcaccgccgtagccgacttcactctggcttatcagtaagtgagaccgcaggcttaatcaaccaggcatggggcacgccgcatgcctggtgactctctgtgtcaaaggaatgtcgcgatgtttttttcaaggaatcgggcgagtgccgttcttttggcgtcgttggcgtttgcgcccggcagtgcaatttccgccgcacaggggtggggcaaagtcagtatgcacggcgccattatcgacactgcctgcgccattgccgccggcagccgcgatcagacaatcgatatggacacgcttcctatcggacagatcattcgtgacggccagggaatgactaaacctttcagtattgaattggttaattgcattttggaacgtccggaaaacaagcctgattggaaattctttcaggtcacgtttgatggtttggcggaaggcgctttgtttggcgtacagggcgatgcgcgcggcatcgcattgaagataaaagacagccgcggcaggccggttattccaggggagccgttgccgatggagggaataataccgggcaaccgagtgctgaattattccatgacgttaatgccgaatcaccagccgttgaaggtgggagcgtatttttccacagtgcgttttaagctggattatttttgattttttttcgtactgacggttaattcgttattgaaaggactttattatgctttcaccggcagggaagttatttcgtcttcaggccttggggctctgtgtcgccctttctctgggaaatccgatcgcgttggtttatgccgccgacgttattcaattcaatactgatgtcttggacatcaacgatcgtaaaaatatcgatctgagccaattcacacgcagcggctacatcatgccgggcgtttataccatggtggtgcacgtcaataagaacgatctggcggaacagccggtgacgtttatggcgcccgagaacgatcctaaaggcagcgaagcctgtctttcgccggagttggtcaaccaactggggctgaaagaaaaactgttaagtacgctgaactggacgcacggcggccgttgccttgacgcctccagcctggcagggatggaagcccgcggcgatcttgccagctcctcgctgtacctcaacattcctcaggcctatctggaatacagctcggaaaactgggacccgccttcgcgctgggatgacggtattcccgggctgctgtttgactataacgtcaatgctcaaacgcaaaaacatcagaaaggcggcagcagttacagcctgagcggcaacggcaccggcggcgccaatctgggcgcctggcgtctacgcgccgactggcaggctaatctcagccatcagaccggttcttctcagtcgaccgacaaacagttcgactggagccgctattacgcctaccgggctattccggcgctgcgctcgcggctgacgatgggggaggattatctgaactccgacattttcgacagcctgcgctttaccggcgtcagtctgcgatccgacgacagcatgttgccgcccaacctgcgcggctatgcgccggaagtgacgggcgtggcgaaaaccaacgccaaggtggtggtcagccaacaggggcgcgtgctgtatgagacgcaggtggcggcggggccattccgcattcaggacatcaacgacgcggtttccggcgagctggacgtacgcgtcgaagagcaagacggcagcgtgcagacgttcaagatgaataccgccaacatcccttatctgacgcgaccgggtacggtgcgttacaagctggcgacgggcaagccgtcggagtgggggcatcacctgcgcgggccgatgttcggcaccggtgagttctcctggggcatcagcaacggctggtcgctgtacggcgggggcatcgccggcggcgattacaacgcgctgtcgctggggatcgggcgcgatctgatggcgctgggggcgttgtcgttcgatgccacgcagtcgtgtgcgcgcttgccgcaggagggcgctctgaccggcggttcataccggttgagctattcgaagaacttcgaccagtacgacagccagatcaccttcgccggctaccgcttctcccaggaggacttcatgagcatgggggactacctcgatgcgcgttacgaagggggacgcagcggcaagagcaaggagatgtacaccatcaccttcaacaaacagttccgcgatctggggctcagcacctatctcaactacagccaccaaacctattgggatcgggcgccgaacgatcgttacaacctgatggtatcgcgctacttcgatatcggcgatttcaagaacgtcagcgtatcgctgtcggcctatcgcaaccgttacaacgagcgcaatgacgacgggatgtacctgtcgctgtcgctgccctggggcagcgccgggacgctcagttacaacatgacgctcgatcgcgaagagaacgcccatcgggtcggttactacaaccgggtcgatgaacacaacaactatcagatcagcgccggcgccgcacgcagcggggcgacggccagcggctattacagccatcagggcgatatggcgcagatcaacgccaatgccagctaccaggccggccgttacagcgccgtcggcatcggcgcgcagggcggcctgacgatggcggcggaaggggcggtgctgcaccgggtcaatacgccgggcggcacgcgcttgctgctggataccgaaggtgtcgccggcgtgccggtgcgcggctacggcagtacggtgctgaccaaccgttacggcaaagcggtggtggcggatgtaaacagctactaccgcaataaggccagcatcgatctcaatagcctgagcgacaacgtcgaggcgacgcgttccgtggtgcaggccacgttgaccgagggggccatcggctaccgcaagtttgaggtgatagccggcgagaaggcgatggcgatcgtcaaactggcggacggcagcgagccgccgttcggcgccacggtgctgaatgcccgcaaacaggagaccggcatcatcaatgacggcggcagcgtttacctgtccggcctcaaccccggcgagcgcatgcgcgtgcattggaacggcgcggcgcagtgtgaaatccagttgccggcgccgctgccggccgaaatgctgatgaacacgctgctgctgccttgccgtccttttgccggcaacaagccagcggctgacgccaactgacttacacccggcggagtgcgctccgccgctaaaccgccggggcgggattgcccgccttcggccgactggaaccgtgaagacatgatgaatctgactatgaccagaaagaccgtttcccttgtgggcccgctcgccgccgcattgacgctcggcgcggtcggcctgcccgctcatgcggctatcgcgctggatcgcacgcgcgtgattttcgacggcgacctgaaaacggtcagtctcaacatcagtaaccagaacaaacagttgccgtatttggcgcagggatggatcgaagacgatcgcggcaacaagatccaaagccccttcaccgtgctgccgccggtgcagcgggtggagccgggcaaaccgagccaggtgaagatccagtcgctgccggccgcgcgtcagctgccgcaggaccgggagacgctgtattacttcaacctgcgggaaataccgccgcggagcaataagccgaacacgctgcagatagcgttgcagacccgcatcaaaatgttttatcgcccggcggcgctcgccccgaagaagaacgcggcgccgtggcaggagcagctgacgctgacccggcagggtgacaagtatgtggtgaacaacccgaccccttattacgtgacgatcgttgaggcgagcgccggcaagggcggcaaaggggcggccggctttgaaccgttgatggtggcgccgaaggccagcgccccgctgaacgtgcccgccgcgagcctcggcaacggtccgtcgctggcgtacatcaacgattacggcgggcggccgcagttgaacttccgctgcgccggcagtgcctgccaggtcgtgccggtcgccaaatgacgagccgcgcgcaagcagggaagaccgagtcatgaacacagcggagtgaacgaatcatgcaacgaaagatccccatgctgttgggaaaggcctatgaacgtcatcagcgacgcactatcggcctgacggtgttggccgcgctgatggtgccgctgacggcgggcacgatgctgatgctgatgccgccggcccgcgcggtggacaactgggacgtggagggggcgaacggcacgctccacgtctacggcgcgttgacggaaagcgcctgcagcctggaaatgaccaccgctcgtcaggaagtgtggttgggtgagacgggaacggcgcacttccagcgcccgggcgatcgcggcacgccggtggcgttcgagctgacgctgaaagactgcctgcgggcgccggcgagcagccgcgacgcctggactggggtgctggcctggagcggcagccagcctgcggtgtccgtggcgtttgccgcgccgacggatgacgacgcgccggggttggtcagggttgccggcgtcaccgggttggggttgcagctggcggatgccagcggcctgccggtgcgcctcggcgcgcgtaacaaaccggtattgctgacgccgggacaaaacaccctgacgtatacggtgacgccggtgcgcaccccggcgacgctgagcgccggcgcttaccgtgcggcgatcgatttccggctttactacgactaatacgccgcttgcgcccggtcggcgcaagcacaaccaaagggagtggcgtcatgcgcgcgacagagacgaaccggcgccggagcgcgctgttgggggctggcatggtcatggcggccggcataatggcgcagtcggcggccgcagcggaaaacatgcgctttcacggcacgctggtggctgagccgtgcgtcattcagccgggagatgaggatatccaactggatttcggcaccatcgtcgacaaatacctgtatctgaacacccgttcccacagtcaaaccttcgcgttgcacctgaccgagtgcgatctcagcctgggcaatacggtggctatcacgtttaccggcaccgagaacgccaaactgcccggcctgttggcactggatgccggcagcctggcgtcggggatcggcatcgggctggaagacagcagcggcaaggcgctgccgctcaatcgcgccagcgataaattccgcctgagtgccggcaacaccacgcttacgctgcaggcctatgtgcaaggggaaccggaggctatccagacgaagtccatcggccgcggcaccttcagcgcggtggccacttttacgttggaatacgaataagcgtctacaaggacaagaaacgcaatgatgagaaagcacatcaatcacgccctgcgcatggggctgctgtgcctgttggcgttgagcgccgccgcttgccaaagccaaaagtcgggcaagcccgccgtgaacactaaaaatcaggttgtgcaacctccgtcagaagaggctttgcgcaagcagcgtgaggccgaacagctgcagcagtgcctgcagcaactgggcgcattgcgcgcgatcgacgagaaacagtatcagcgctataaacgggccttcgacagcctgatgagcggcgcttcgcagtacgccagcctgcgcgcccgggtaaacggcgacacgcaggagacggtggatgcgctgtatcgctacaaggtcaactatctgtgcgccggggtgaatcaggcggtgttgaccggcttggcggatcgtggggagcagattaaatgaggctgtgcctgctgggctgcgtcgctctgctgttctccggcgtcgcgcttgcggacgacggcgtgccggcgctgctgcagtttgccgagcagtatcaacggcaaaacgtcgtgccgacgaacgaaaaagcggcgccagtcgaccgcgagtcggggcaaaaaaagcgtgaacccgcgaagcgcccgtcggacaacaataagccagcctcaccggccaaagcttttacgctgacccaggaattattggcgcgtgaccaacagctggcgcgccagcgaatggaactgacgatgttgcgccaggaactcgccgcgctacgggcggagaaagcgacgccatccgtcgcgacgttgcccgactcgtcaacgctgcaaaagtggatcgccgggttgggcgccgcctggcgcggctcgcccgacgcgcagcgcgccgaggcgttgctgcgtcaggcgacgcaggaaaccgcccaaagcagagcgacggcggcgcaggccgaacggcgcgtcaccgaacttgagtctgccgcgcaggcatcggcacagacgcttgcacaacgccaacgcgagcaccaggaggcgttgcacgctctgcgcgccgcgttggaagaaagcgagcagaagcgggccggtgagcagaaggcgactcagcaggcgcgcgaagacctgctggcgttgcgtaagcggctgcaatgggagatgacgccggagcagttgaaggatgatcgcaagcgtctgtcctatgcggcgggcagtgcgctggggcgggacattcagggggtagtggcggagcgtcaaagttggggcgtgccggtggatcgcgacagcctgttggcgggcgtcatcgatagcgtctcggggcgtttgcggttgccgccggatgaactgaatgcgctgacggcgcaagcggatgccaacgccgtggccgcgcgtgagaaacgcgttaacgaacagcggcggcgtgatgaagattacctgacgcagttcagtcaacaaaaggacgtaaagcaatcggcgatgggcttctggtatcgggtggattacgccggggagggcgcgctggcgccaacgacggtggttgatgtggtcgtgaaggagacgttgaccgacggtacggtgatccaggatatggaactgagcggcaaggtgctgtcgcaaccgttgtccgagtatccgccgctgtttcgggaggcgataagccacctgcacaaccacggatcgctgacgatggtcgtgccgccagcgctggcctacggcgaaaccggctatccgccgaaagtgccacccaacgccaccatgatttatgaattacgcatcgacaacagtcaggcgccgacaaagggtgcccaggcggttaaacgggaagccggaacggcggggaggcagggatgaacacgatgataaaaatcgcgctatttgatgaaaaccgttacttcagcgccggttggcaggaggccctggcgctgcacttcagcacttatggcaagcgcacgctgttactggatgcgcagcaggttcacgaagccgatctggtgttctgctattttccccccggcgtgcaaagctgtttttgtcacttctttgaggcgcagaccgcagggcgcaaaacgctgtatttctcgttgcgaatgccggaggggcggcataaacgcaccgtcggtaaccgctgcgcgctggaggccggcgtcatctaccacgatatgccgttggtttcggcgctgtatcaggtgagtgccgagctggagcggcgcagcaaatggccgaaccggccgggttgtggcaggaactgcatatgccagcaccgcggcctgacgctgcgcgaacaggagatcatgcgctgtatgacgcgcgagatgggggtgacgcaaatcgcccggatgctggacatcagcgtgaaaaccgtcagcaaccacaagatgagcgtgatgcgcaaaatgggattccggcgtaatgccgaactttacggttggctgcggcacagcgctcgtcccggggctgtgggggggcgagccggcattcaggtgggcgttgcggcagggaaagagcggcattgaaacggcgccggccaagtcagaccggccggcgcctttagtgcctcgccgtggcgatcagttacaggccacgaccttgatcgccagcccgccctgggaggtttcgcggtatttggcgttcatgtctttgccggtttcgtacatggtttcgatcaccttatccagacaaacccgcggctcgctggtgcggcgcatcgccatgcgcgcggcgttgactgccttgacggcggaaatggcgttgcgttcgatgcacggcacctgaacctggccggcgagcggatcgcaggtcagccccaaatggtgctccatggcgatctccgccgcgatacacacctgcgccgggctgccgcccagcagctcggtcaacccggccgccgccattgaacaggccacgcccacttccccctggcagcccacttcggcgccggagatcgaggcgttcatcttgtacagcgcaccaatcaccccggacgccaggaaatagcgggtgtaggagttggcattcaccgggcggatgaacttgtcgtagtaggccagcaccgcagggatgatgccgcaggcgccgttggtcggcgcggtgaccacgcggccaccggcggcgttctcttcgttgaccgccagcgcgaacatgttgatccaatcgaccacgttcatcgggtcgatattgttcttgtctccggtcaccagaatgcggcgcagcgcggcggcgcggcgcggcaccttcatcgggccgggcagcaagccttcggtgttgatgccgcgctcgataccggcgctcatcacctgccagacgtcggcgaagtgcgcgtcgatatccgctttgctgcgcagcgccagttcgttctgcatcaccaggccggacaacgacagcccggtctctttgcaatgctgctgcagatcgtgcgccgatttgaacgggtagggcactggcgtggcgccctcggtggattggccgaagtgctcttcgtcgacgatgaaaccgccgccgatcgagtaataggttttgctgtgcagcaagcgttcaccggcgaaggcgcggatgcgcatgccgttttcgtgcagcggcaggttgtcgctgtggaagttcatgccgccgtgcagcgggaaatccacctcgtgatggccgttggccagcggcaggcggccgcgctgttcgacgtcgcggataaagcccggaatgctgtcgatgtccacgtcgtgcggcaggttgccggccaggcccatgatgatggcgatgtcggtgtggtggcctttaccggtcaacgacagcgaaccgtacacgtcgaccaccacgcgggtagtgtcctgcagctgctggtgggcgatcagatcgtcgacgaactgtttgccggccttcatcgggccaacggtgtgggagctggatgggccgatgccaattttgaaaatatcgaaaacgctgaccatggtctcgcctccttcttcaggtttcaggcggtgaatacgggaaatgggggcagtgcgggagggccggcgcgcagcggcgccggccggacgtgattagccgagcaggctgaacacgatagcagagatggcgatcagacccatcacaaccacaaacacgttgctgatgtggccgctgtacttgcgcatggcaggcactttacggatggcgtacatcggcatcaggaacagcagcatggcgatgattgggccacccagggtttcgatcatgcccaggatgctcgggttcagggtggcgacgatccaggtggtcaccagcatgaagatagcggtcatgcggttcagcttggcggtgctgacggttttgccgcggctcttcatcgacttggcgaccaggccgttgaagccttcacgggcgcccaggtagtggcccaggaacgatttggtgatggcgacgaaggcgataaccggcgcgatgtactcgatcatcgggttgttaaagtggttagccaggtaagacagaatcgagatgttctgcgccttggcttccgccaggttttccggcgtcaggctcagcacgcagctgaacacgaagaacatcacggtcagcaccatcatgatgtgtgcgtaagccagaatgcgggagcatttcttctcggcgtctgcgccgtactcttcgcgtttggcgacggcgaaggcggagatgatcggcgagtggttgaaggagaacaccatcaccgggatcgccagccacagggtcatgatcaggccgtgacccatgccggtaccgctgccggacagcgacacgttttcgaagatggcgccggtccagttagggatcagatacaccgccagcagcatcagcactgcgacgaacgggaagaccaggatgctcatggttttcacgatggcctgctcaccgaagcgcacgatggtcatcaggccgacgatcaggatcagcgacagaatggcgcgcggcggcgatgtcatgcccaactggtgggtgatgaagctgtcgacggtgttggtgatcgccacgctgtaaaccaacagaatcgggtagatggcgaagaagtacagcagggtaatcagcttacctgcggtgatgccgaagtgctcttccaccacggcggtgatgtcttcaccgggatttttgccggacagaacgaaacggcacaggccgcggtgggcaaagaaggtcatcgggaaagcgatgatggccatgatgatcagaggaatcaaaccgccgatgccggcgttgatgggcaagaacaggacgcctgcgccgatggcggtgccgtacaggcccaacatccacatggtatccgttttacgccaggtactgctggagcccgaggccgcagaggcaattgtgccggtctgtgtagtgtccataaatatctccgaagtgaacacgaatttaaaattaaaaggcaaaacttaaggttaaaccgtcaaacgtcctattcaggcaacgcttgcggtaagaatcaggtgttgcttgcggggatgttttggcgtccccctggttgtttattgcgttcattaccaaggcacagcgccgggtaattcactaaagacttttcaccgtcgcggacgataaaagtcgttaccgctgccgacaggtctttgcctgtcgatttttgttggcggcaagataacgatttacagtagaaacaaccgtgatcctgctctcaaatgcgcaatatgtgcagttatcagcttttttatcgatttttcgcgcatttgttgcacatttgtgtaagattttgtgctgagaacgctctcatgaaagtttctgcgattatgcggcttgtacaataattagccggataaagcgctgtgctcagcagcaagccgagcaatatattttatgcgtggttttggatctagcgaaaaacccggattaagcagttttagtgatgtagatcacattatgtttttaaggtaaataacgtttatctttttgtttttattttgtttttgttgaaaaacaccgctagtaacgaagggaaattacttacgtggttagcggataaaaatgcgtaaccattcatcatataaataacagatagctaacaggtattggcgagatttgctgcaatcgcgtaaaccgccgtttatttaaacttcctggcctttggctcgatttatcatataaaagccataaatagccgttaattcacccaaccgaccgcgtggttagcctgcgaaaaaataatcacgcgggtgagctgttgcattttattaacctgatgttgcgtgcggataagcgaaaaacgcgaattgattgcgcattatttgttcattttttcggcggggaaagagggatatcgaagcggtgcgccgtcggttatgacggcgctgaaggcggactaatagcggatagcgatggcgttatcgttgaagaacgccatgaagtcggcgtccggctggcgatcggtgatcacccgatcgaactgcgtcagcgggccgatgcaggccggtttggttttgccgaacttgctgtggtctgccaccaggatcttttgctgcgccatcgccatggcgcgatgcttcatctccagctcgtcgaagttgaagcaggtggcgccgtgctgcaggctgaggccggcggcggagataaaggcgatgttcgggcagatgtgatcgagctcgttacggccgccgacgctggaaaagatgtagttgttcggcttgaactcgccgccgcacagcaccaccttgcagttcggtttgtcctgcagcgccaggaaggtgttcagcgaatgacacacggcggtgaaagccagctcgtcggtgatggcgtcgatgatcgccggcgtggtggtgccgcagtcgaaaaacaccgtgtcgttttcattgatcagcggcgccgccagcaggccgatgcgccgtttctccgttacctgtttggctttttgatcggaaacgaagtagttggtcacgccgttgctgcgcggatcggtcaccacgtagccgccgagcaacaccacggccgccggttcggcgctcagatcgcggcgaatggtcatctccgagacccccagcagcacggcggcttctttcaggtggatcttgtcagcgcgttttaacgcctgaactaaccggttgatacgttcttcgcgccgcgtttccatagatccgtcttcccacaggtagtagagataaaaggcgagccggcatttccggcgctaaacagaacgatgcggggcaatatcgggccgcatcaaccgcccgtattgtcccgcatcggagtgtattggctatgcccctcagggcatgccgacgatcagtagctgcccgctgccgcctgagcgccggagacgatggcgacgccggagctggtgccgatacgcgtggcgccggcgttgatcatcttctcggcggtggcgcgatcgcgcacggcgccggaagctttcacgcccatttcgctgcccacggtctcgcgcatcagtttgacgtgctcttcccgagcgccgccggtgctgaagccggtggaggttttcacgaaggcgacatcgagttcgcgacacatttcacaaacctggacgatctgcgcatcgctgagcaggcaggtttccaatattaccttcaacgggatcgccgcgcaaacctcgcgcacggcggcgatgtcggctttcacttcgtccagcaggccgctcttcagccagccgacgttgatcaccatgtcgatctcttgcgcgccggcggcgatcgccgctttggcttcaaaggctttggagacggtcaggccggcgcccagcgggaaaccgatcaccgagcagactttcaccgtgctttcctgcagcagctgggccgccagcggcacgtagccggagttgacgcataccgcatagaagttgtgctgctgcgcttcttcgcacagtttggcgatctgcatttcggtggcgtccatggccagcagggtgtggtcaacatagctggcgtaatcgatgttttcggtggtcatcgcggttccttagtgaagttgagaaaagagcatggatagataatgtgaaaataataacatttcaatgtcgataaacctagcgggatttgaaaaatgtcgacgagatcatagttacttcactgttatatgtataacttagaggagggttttttgttatttaaataacattttcagtggccgctcgcggcctgcgcgggcgaaacgtcgagggaaaaaagatgaagatcaacatcgacctggctcctgaagctttcgggacgtatcggcaggaactgttccgcaacgcggatttcgcggtgagcgcgcatcgctgcgcagaacgcgggccgatgctgacgctggcaaactgccgtggcgcgctgacggttttgccgtatcagggcctcgcgatctgggacgccgagtttgacggacattcgctgaaatcgggccgccgcagcgtgcggggcgccggaagaaagcgcgctgacgacgccgcgttctgtcccgcctggccgagccacgacggcgcgccgctccagatgcaacgcgtgtggctgcagctggcgggcgatgagctgacgttgcacggtgaaggcgagcggttgggcgggcgttggcgcatcggcccggcgctgcgtctggcggcccagagcgcgcagttcgccatagagatgaaggttaccaacctggccgatcggccgcagccgctgcgctatgtgtgccgcctcaactacgattgcattcccgacgcggtgttccgccagaacctgccgacgccggcgctgttgggagaggcgcttgggcaggaactgctgtgctccgacgatctgacgcgctacgtggatcaggccgagttctttatgctggcgccgcaaggccgccgctatgtgacgcgttttgccaccgggcaattcaactatggcctgcggcgcatcgctgtccagggcaacaggcggctgcttgcttttatccagccggcaaactgccggcctaacgcgccggaaggggaggcgggagtgatgctgggagcgggaaaaacgcgggcattttgcgtgaccaccggcgtggtgtgaaagcaggggcggtaacgcccctgtcatgttatgcggttattctttcacccagccgcggcgaatggcgaaggcaaacagaaagcgatacaggcgcgacagcctgtcggcgaggacatcgccgaacagattccataccagctgagcgaacaggcagccgaccaggccgagcaggaaaccgccgaccatatccagcggccagtgcacgccgaggtaaacgcgtgaccaggcgatgccgacggcgacaatcatcagcagcgcgccggaccagacccggtgccagaacaggaacgccagcgcaaaggtaaagatggcggtgccgtgatcgctggggaacgaactgtccggcacgtgcgccaggaaggtataacccacgccggcgacgaacgggcgctcatgcggcagcagcgcgccgatagcggaggcggcaagcatggcgaacagcagcgcgatcgtggttttcgccaccacttcgcgctgcgaaaccagctggctgcgcggcccccacagccacaggccgacgatcagcagcggcacgataatgataagatcgcgcgccagaaaggtggcgaaatcgatcatccattcgggagatgccggggtcgcattgatccaggcgaaaagaacatggtttaactgctccataaccgttacctcgtcttgcggcgccaatagccgctaactatccaataaatcgccaactggcttaaccaaacccaccaacctgcccacaggttatgggtaagaaaatgtgcgccgcgcatgatctgaccaaagcccatcaacatgccgagcgcaataccgccgcaccagcagcaccaggccaggcgcgggcgctgcggataaaacaggaaaaacaacgccatgaccgcgaaaccgctcgaggcgtgcccgccggggaaacagcgaccggggcccggcagcgccggtaccgcgccgaacaacgggaaggacatcgccttgccgccgtactcgatcagatcccacggacaggagtgcgcgctggtggccttgagaatgcccaccaccagcgggccgatgccgagaagcaacatgctgacaatcaggcgcgcgctgcggcgatagatgccccaaaacagcgtcagcaccgctcccacgatcactatctgcttcaacagacggtgattgatcagatccagccagtaattgttttgccacgggaaatgcccgctggcggcatcgtaccaatagttgctgatcgcccagtccagctgttcgttgcgggagagccacaggaacaccaaaccgctgatcagcaggccaaaaacttgccaacggtaaaaggatgtcggcagggagtaaagggcggttgtcttaatttgctgtgccgttgaggattgatttaatgacgattctggattcacgcgcaggctcggtgacagtattgaatagcgccactgtaataattctgtcttaagaaaaccttagtccgccggtaagaaaaccctatctgatacacctggttgtgcgcagatcatcacctgtttatctcgtcttaatcggcggttttttctggggtattgctccggctaacggggaatgccaggcgattgtcactatttatcgcctattgtaaagaagattaaacctgtggcgagcttggcggtagtgtattagtttatagacggattatttgacaaaaagtgtagggataaacatgaacaaggcatccgttgtattttccggcctgctgatggccgtttccgccagcgccatggcggccacctctggcgacgatgcggatatcagcaaacagccgctggaaaaggtcgcgccttacccgaaagccgagaagggcatgaaccgccaggtgatctacctgccgaagcaagagcacgaagagaactacaaggtagagctgctgatcggcaagacgctggaagtggactgcaaccgccatatgattggcggcaccctagagaccaaaaccctgtccggctggggctacgactacctggtgctggagaagctgtccgaaccggcctcgaccatgatggcctgcccggataacaccaagaccaagaaattcatcgccgccaacctgggcgacgccgcgatgcagcgttacaacagccgcctgccgatcgtggtgtatgcgccgaaagacgcggaagtgaaataccgcatctggaaagccgaagataccgtaagccaggctgaatcaaagtaatccgcgattagcgctgtgaatacatgatcttgtacaaaaccgtttgaagagcattttgcgatgatatgcggctcttcaggcggttttttattttcaggtaggaaagccgggtgcttagccaaattttttcaacctacagagggaaaaaggaaagtgactcaagctaacaaggttaacatccttggtttaagggcatttttttaattttcactcgcaatatcctcattttttatctcccttcatctctgattatattattttgaattgcaattatttcggtaataacaaaccgtttcggttacataaataaaaatattcttattaatcattttattgttgttttattgattttatttaatggcgaaggaatggaaattaattattgtgctgctagattcatcaatgtaattagctccacggcaattacattgttcgctaattaatatctaaaaaaacttacgaggatattccaatggctgattgtaaatgcaatgaacaagatccgcacgctcaaaatgaacatgttgctgattttactgcggttggattttcgcaaaaaacaccggcgccggtacctgtagaccttaagcagcagggcgtgttggcgcttaaactttcggtttgcgttggggccagttataaccctgcaaacaaccaaatttgttttaccattcctgtctacggtgacttttgcgtttcttcgccgattccaattcccattggtgggcagcttaaagtgtgcgcagagacctgtggttcctttattcctacgggattgaaggccactatttatctgaacggttccgttctgttctctgtcgttctttttggcgcttgctaatgtaaaaagaaaagcaaggcaccgtaggtgtcttgctttttttgatattaagatattgataaggccgttgttgagttcagccccacttgctaattaatacagttactccgctctcactccttctgaaatcaaaccttgggaagtcattgtctgatagccgaccgcccgacactaaacgttaagagaaacgatgtttcaggaaggagcggacgcggcgctgtacgtcgtcagttgaggtgttgctgccatctgatggtggtcccgcgggcggtggagtgcaggcaacaaaaaacccgataatcttgaacctaaaaggcgggattatcgggctccacaaaatggggacatcaaagaaaagcagtggcactaattcagactgcggcccccaacgaaagttctggccggcgacaaaaaaatcaaaatatttttatcgccgatccatctctcccgctaatcgatcagccgagtatgcccggccatagcactacgatgagcgaacccgccagcgttaacagcacgttagcgatggcgtaggtgccggcgtagcccaacgccgggatgttgctgcgcgcggtatcgctgataatttccatcgccggcgcgcaggtgcgggcgcccatgatggcgccgaacagcaaggcgcggttcatgcgcagcacgtaggcgccgaacaggaagcagataatcaccggcaccaggctgacgatcagcccggcgatcagcatctggccgccgaccgcgcccaggctgtggccgatgccggcgccggcgctcagacccacgcccgccataaacaccatcaggccgaactctttcaccatgttcagcgcgccctgcggaatgtagccgaaggtcgggtggttggcgcgcaggaagccgagcatgatgccggacatcagcagaccggcggcgttgccgatgccgaacgagaagttgctgaactgaatggtgatctggccgatcagcaggccgatgatgaagaaggcgcagaacgccagcagatcggtcacctggctgtggatcgagataaagccaatcttctccgccacgctcttcacccggcgtgcgtcgccgctcacctgcagcacgtcgcccttgttgagcacgatgctgtcgtcgatcggcatttcgatctggctgcggatcacgcggttgaggaagcaaccgtggtcggtcagcttcagctggctcaggcgtttgttcaccgcgttgctgttcttcactacgatctcttcggtcacgatgcgcatgtcgagcagatcgcggtcgaacacttccttaccgttgcggaagctcggatccagccgcgcgtgggcgtccggataaccgaccagcgagatctcgtcgcccacctgcagcaccgcgtcaccgtccgggttggccagaatgccgttgcggcggatgcgttcgatgtagcagccggtctggcggtagatgcccagttcgcgcaggttcttgccgtcggcccaggccaccagctcggggccgacgcggtaggcgcggatcaccggcaggtagaccttgcgctggctgtcggtgtccaggccgcgttcgcgagcgatttgctgggcggaggtggacagatcctggtgctgcagcttcggcaggtagcgcgcgccgaaaatcaggctgaccagaccgatcaggtaggtgagggcatagccgaggctcagatgatcctgcgccgccagcagcgccgggccgttgacgatggtgttgcgcagcgtatcgccggcccccaccagcaccggcgtggaggtcatcgaaccggccagcatgcctgcggtcaggccgatgtcccagtggaacagcttgccgagaccgatggcgatcaccatcgccgaaccgaccatcaccagcgccagcatcaggtaatttttgccgtcgcggaagaaaatcgagaaaaagttaggcccggcttccaccccgacgcagaaaataaacagcatgaagccgagattcagcgcctcggtgttaatggcgaagtgttgctggccgagcaacagggaaaccaccaaaacgccaatggaattaccgagttggacggagcccagacggagtttaccgaggcacagccccagtgcgagtaccacgaacagtaacagaatgtagttaccgtttaacaaactagcgacgtttatgttcacggaggataacttattgtttaccagtaagtgcttgatatagataactataagagataaattcagccttaaaacgacatcataaatcaccaccagcgtaaggcgaagcgaaccatcgttcggcggcgttcattctagacgctatgaccgatgacagccagcacagaaagctgatttcctgcgccgccgtgcgcatttaactctcttttgaccaaggaaaaaattcggttcagcgtcaccgcacgggtgaccgggccgatttctattgatgcggtaattgggcgggggagaattcgcatgacgagttatagatattggctgggcattctcagctgttttctgttgttcagcctggtgtttctcggccagcaaaccggcctgttcggcagcacggatcatgagcaccacggtgaaaccggcctgctgctgtttgtgatccccggcgcgatcgccagctatttgtcgagccgcaagcggctgctttgcccgttgcttggcgcgctgtatgcattgccgctgtgcctgctgatccgccacttctggctgacgccgtcctcgtcgttttggcaggaactggcttacgccaccagcgcggtgttctggtgcgtgttcggcgcgatgctgatgctgttcgccctcggtttgttgcacacgcttcagcagttgcaccggcggcagcggcaataaaaaaaggcgcattaagcgcctttttgccgttcaaaaacttactggaacaggttcaggtgttctttggcgtaagcttcgaaatcggtgcagccaccgatgtgcttctcatccaggaagatctgcggcacggtttcaaccggtttgccgacggttttttccagatcggccttggtgatgccttccgcgtggatgtcaacgtaacggaagttgaaatcgtcgcgttcttcagtcagtttttccgccagttctttagcgcggacacaataaggacagccaggacgcccgaagattactgcaaacatgcaacgctccttaattggattttcgataaattattcgcgattgcaacgacatcccgtcaccgaaaaagtcattacctgcgtcagatggcgcctactatgcccgttgaggcggtgaaaaaaaagcaggaattacctgttaatctgattcatgtaaccaattagtctgccggggctgtcgccgtcggcgggaattcactacactgggggcagaccttctggagaagaaaaatatgcgttcattcggtgacttaccgcgcccggtgctggtgttggaagggctgggtatcgtgatgctggtattggcctacctcagtattcacggccacctgcagctgccgggctggctggcgtcgcagcaggcggcggtcggcatgattttcctcggcgtggcgctgatggtgccggcggcggcgtttctggtatggcgcgtggtgcagggcttcgggccgctgatgcgcggcggcttgccgccggaaaacgatcgccgcaaaccgcaagatgcagacgcatcgaaagataatcaggatcgcgatccgcgcgcctgagcgccgcggccgctaacccgcctgccgggcaggcgttggcttttggggtgacgagtgaaaattgccattctttctcgcgacggatcgctctattcatgtaagcggctgcgtgaagcggcggaagatcgcgggcacagtatcgatatcatcgatccgctctcctgctatatgaacatcaatccggcggcgccgaccattcattatcgcggccgtcagctggaacgttacgatgcggtgatcccgcgcatcggctctgccatcaccttttacggcacggcggtgctgcgccagttcgagctgctcggcagctacccgctaaacgaatccgtggccattacccgcgcccgcgacaagctgcgttcgctgcagctgctggcgcggcagggcatcgatctgccgatcaccggttttgcccattcgccggacgacactggcgatctgatcgagctggtcggcggcgcgccgctggtggtcaaactggtggaaggcacgcagggcatcggcgtggtgctggcggaaacccggcaggcggcggaaagcgtgatcgacgcctttcgcgggctgaatgcccacatcctggtgcaggagtacgtgcgcgaggcgcaggggtgcgacgtgcgctgtctggtggtgggtggccgggtggtggccgccatcgaacggcaggccaagcccggcgagtttcgctccaacctgcatcgcggcggcaccgcccgcaaggtgaccatcaccgccagggagcgggcgatcgcggtgaaagcggcgagcacgctggggctggacgtcgccggggtggatatcctgcgcgcccagcgcggcccgctggtgatggaggtcaacgcctcaccggggctggaaggggtggaaaccactaccgggctggacatcgccggcatgatgattgaatacattgagcagcgcggccggccgggcttccgcctgaaatcgggcggttgacggggcgggcggtgcgcctttcccgccgtgcaatatctgaattagtgaattaagccgcattgatcgtggcgtatcgggtgaatattccgtaagctatgcgccttttcgcgtattgaatattgtgaggctggttattatggattcactcattgtccccgatttggcgctgttgcggcgctggctggatcagtcgggcatttctttctttgagtgcgattcctgccaggcactgcacctgccgcacatgcagaacttcgacggcgtgttcgacgccaagatagatctggtggacaacgtcattctgttctccgcgctggccgaggtgaaaccgaccgcgctgatcccgctggtggctgacctgagccagatcaacgccagctcgctgaccatcaaggcgtttgtcgacattcaggacgacaacctgccgaagctgatcgtctgccagtcgctgagcgtggcggtcggcatcacctacgagcagttcacccacttcatgcagcagggcgaagagcaggtctcgatggtgatcctcgaggcgcgggcgaacgatctgctgtttatgggggacgaagaagagatccccgctggcgccgtgcgtcagccgatgctgcactgatcctcgctgtaccttaagcatgccgtcgctccggcggcatgctgccgtgattcccctccgcaattaaatattctgcactttggcctctgtcgcccgatctttctcggcttttacgccgttaatgccgtatcacatagagaaaaattgcataaaaaatcgataaatggcgttttttaccctgggggctggcgggttgcgatggcagcggctatgctgctgattctgcaaagggcttgcgatttcccttgtaaccacgcgagcagggcagtgcaaaaaggcgcatgcaatcatatgcatagccattcatttcgcggttgcaacgattgcgctcaatcaggaaaggttttgtatcgctgcagatacaagttcaattctatgatttaccctgttttggaggaagttacggatggtcacccaacgtaaaaagtggttatcgggtgtggttgccggcctgttgatggccgcgtccgtcaatgcgtcagccgaagagaaaacgctgcacgtgtataactggtccgattatatcgcgccggacactttggctaatttccagaaagaaaccggcatcaaagtggtgtacgacgtctttgactccaacgaagtgttggaaggcaaactgatggcgggcagcaccggttatgatctggtggttccttcatccaacttcctcgaacgccagtcgcaggccggcatcttcgaaccgctcgacaagagcaaaatgcccaactacaagaatctcgatcccgagatgctgaagctggttgcacacaacgacaaagacaacaaatacggcatcccatacctgatggtgaccaccggcatcggctataacgtcgacaaggtgaaggcggcattgggcaaagacgcgcctgtcgacagttgggatctgatcctcaagccggaaaacctcgagaagctgaaaagctgcggcgtctccttcctcgatgcgccgagcgaggtttacgccaccgtgctgcactacctgggcaaggatcccaacagcaccaatgcggcggactacaccggcgcggccaacgatctgctgctgaaactgcggccgaacattcgttatttccactcttctcagtacatcaacgatctggctaacggtgatatctgtgtggcgatcggctggtccggcgacgtgatgcaggcggccaaccgcgccaaagaggcgaagaacggcgtgaacgtggcctacgcgatcccgaaagagggagcgctgacctactttgacatgttcgccatgccggcggacgccaagaacaaagacgccgcgtaccagttcctgaacttcctgatgaaacctgacgtgatggcgggcatcagcaactatgtctattacgccaatgcggtgaaagactccacgccgctggtgaacgccgaagtgcgcgagaacccgaacgtctatccgccggccgatctgcgcgccaagctgttcacgctcaacgtgcagtcgccgaagctggaccgtgtcattacccgcgcatggactaaagttaaaagcgggaagtgatgatgggggggatcccccccatcgtcggtaaaccgacaggcgggcgttccccgcctgcattgccgttttgggccacggcgctcgccgtggttttgtgccgctttacgccggagagcaccccgattgaacgacgccatccctcgtcctcaagccaagtcgcagaaggtcttcacccctctgctggaaatccgtaacctcaccaaaaccttcgacgggcagaatgcggtcgaagacgtcagcctcaccatctacaagggcgagatctttgcgctgcttggcccgtccggctgcggcaagtccaccttgctgcgcatgctggccggctttgaacagccgacggaagggcagatcgtgctcgacgggcaggatatgtcgcatgtgccgccgtaccagcggccgatcaacatgatgtttcagtcgtacgcgctgttcccgcacatgaccgtggagcaaaacatcgcgttcggcctgaagcaggacaaaatgccgcgggcggagatcgccgaacgggtggcggaaatgctggcgctggtgcacatgcaggagtacgccaaacgcaaaccgcaccagctttccggcggccagcggcagcgggtggcattggcacgcagcctggccaagcggccgaagttgctgctgctggatgaaccgatgggcgcgctggacaagaagctgcgcgatcgcatgcagctggaagtgaccgacattctcgagcgcgtcggcgtgacctgcgtgatggtgacgcacgatcaggaggaggcgatgaccatggcggggcgtatcgccatcatgaaccgcggcaagttcgtgcagatcggcgagccggaagagatctacgagcatccgaacagccgcttcagcgccgagtttatcggttcggtcaacgtcttcgactgcgtgctgcaagagcgccacgacgatgcgctgatcctgcaaagccccgggttgcgtcatgcgatcaaggtggatccggatgcctcggtggtggacggtgtgccgatccaggtggcgctgcggccggaaaagatcctgctgtgcgaacaagtgccggaagacggctgcaacttcgcggtgggggaagtggcgcacatttcctacctgggcgatctgtctatctaccacgtgaagctgcacagcgggcagattatcagcgcccagctgcaaaacggccatcgtttccgcaaggggatgcccacctggggcgatgaagtgcgtctgtgttgggaaaccgacagctgcgtcgtgttgacggtgtagtagagccggtgaggagtaacccgtatgaccctgctttctgaacgcgcgccggaaccgccggccaaagcgcctggtgccctcagggcgctgttccatcgcctgctgatggcccatggccgcaagctggtgatcgcgctgccgtatttatggctgacgctgctgtttatgctgccgttcctgatcgtgttcaagatcagcctggcagagttggcgatggcggtgccgccctacaccgagctgatgagctgggtggacggcaaactgaacatcgcgctcaacttcgccaactacctgcagctgaccgacgatccgttgtatatcgatgcctacctgcagtcgctgcgcgtggcggcggtctcgacgctgtgttgcctgatcatcggctatccgttggcctgggcggtggcgcacagcaaggcgtcgacccgcaacattctgctgttgctggtgatcctgccttcctggacttcgttcctgatccgcgtctacgcctggatggggatcctgaaaaacaacggcacgctgaataactttctgatgtggctaggggtgatcgatcaaccgctggtgatcttgcacaccaacctggcggtgtatatcggcatcgtttattcctatctgccgtttatggtgctgccgatttacacggcgctgatccggctggattactcgctggtggaggcgtcgctggatctgggcgcccggccgctgaaaaccttcttcagcgtgatcgtgccgctgacgcgcggcggcatcatcgccggttcgatgctggtgttcattccggcagtgggggagttcgtgatcccggaactgctcggtgggccggacagcatcatgatcggccgcgtgctgtggcaggagttcttcaataaccgcgactggccggtggcctcggcggtcgccaccatcatgctgctgttgctgatcgtgccaattttgtggttccacaaacaccagaacaaggaaataggggggcaggaatgaacaacttgccggtagtgcgttcaccgtggcgcatcgccatcctgactgtcggctttaccttcctgtatgcgccgatgctgatgctggtgatctactccttcaacagctccaagctggtgacggtgtgggccggctggtccacgcgctggtatagcgaactgttccacgattcggcgatgatcagcgcggtggggctcagcctgaccatcgccgccgcctccgccaccgccgcggtggtactgggggccatcgccgccgtggtgatggtgcgattcggccgctttcgcggttcaaccggcttcgcgtttatgctgaccgcgccgctggtgatgccggacgtgatcaccggcctgtcgctgctgctgctgttcgtggcgatggggcatgccttcggctggccgtcggaacgtggcatgttcactatctggctggcgcatgtcaccttctgtaccgcttatgtggcggtggtcatcagttcgcgtctgcgcgaggtggatcgctcgattgaagaggcggcaatggatctgggggcgccgccgctgaaggtgttcttcgtcatcaccttgccgatgattgcgccggcgctgatctccggctggatgctggcgttcaccctgtcgctggatgacctggtgatcgccagtttcgtctccggcccgggtgccaccacgctgccgatgctggtgttctccagcgtgcgcatgggggtgaacccggaaattaacgcgttggccagcctgatcctgctggtggtgggcatcctcggcctgatcgcctggtggtttatggcgcgctcggaaaaacaacgatcgcgtgaattgcagcgggcggcccgtagctgaatcgtaacaaacctgctatttttgcaatcaataagtattgcaactaactacctgactttacatgtgccacctgtataggtggcgcgtcgtagcggaacacggatatgtcagacatgctgaaaagcgggcagggaatgggatcgacttcggatgcgccggtgccggtgatggtggcgggcaccgccatggtggcgatcaagtgtatcagcgtggtgctgctgctgggtgagctgggcgtcgacggcgcgcaggagttcgtcaacaccagcgcgcaggcgtgggattccacctttatctttctggccggcctgatgctgctgtgcctgcaaatcagctgcggctttgcggtgatgcgcggccgcaattgggggcgctggggctatgtggtctgccagtgcatcgtggtgctttacctgctgctggccaccatcggcagcgtcttccccgaggtgttcaccgtggagggggaaaccagcggccaaatcctgcacgttctgatcctgcaaaagatccccgacgtggtgatcctggcgttgctgttcgttcctgccgccagccgccgcttcttcaccgcgcgcaagtgagattttaggcgcgcggagtggtaaactctgcgcccttaattcgtcatcctgaacttcacggtaatcttcatgcattgcgctttgtatacggcgggcacctgccgttcctgtcagtggctggaaaagccctatccgcagcaactggccgacaaacagcatcacctgcaatcgctgctggccgggcgcgacgtcgcgcagtggctgcagccggtggcgggggaactgagcgcatttcgcaataaagccaagatggtggtcagcggcagcgtggagcgaccgctgctcggcatgctgcaccgcgacggcacgccggtcgatctgagcgactgcccgctgtaccccgccggctttgcgccgatgtttgctgtgctgaaaagctttatcgcccgcgccggcctgacgccgtataacgtggcgcgcaaacgtggcgagctgaaatacctgctgctgaccgaaagcacgctcgacggcggcgtgatgctgcgtttcgtgctgcgctcggaaaccaaactggcacagctgcgcgccgcgctgccgtggctgcagcagcagctgccgcagctcagggtgatctccgccaatattcaaccggtgcatatggcgatcatggaaggggagcgcgagatcgcgctgaccgaacagcaggcgctggaggaacagttcaatcaggtgccgctgttcatccgcccgcaaagcttctttcagaccaacccgcaggtggccgccgatctgtatgccaccgcccgcgactgggtgcgcgcgctgggtatcgacagcatgtgggatctgttctgcggcgtcggcggtttcggcctgcactgcgcgcagccgcagacgcgcctgaccggcatcgaaatcagcgcggaggcgatcgcctgtgcgcgccagtcggcgcagcggttagggttgttgcaggtagattttcaagcgctcgattccacccgcttcgccaccgccgaaggccaggtgccgcagctggtgctggtcaatccgccgcggcgcggcatcggccaggcgctgtgcgactatttgagccggatggcgccggactatattctgtattcgagctgcaacgccgagagcatggcgaaagatatcgagatgttgccggggtatcgcatcgaacgggtgcagctgttcgacatgttcccgcatacctcgcactacgaagtgctgacgctgctggtgcggcgttaaaggcgctttttggcagccgtgtaagccgctgaacgttcgcgtttgcccacagacaggaccagaaccacgatctccgtttccatgacgcgatataccaaacgaaagcctgaggctctgagtttgattttgtagcaatcaggcaaaccggcgagtttgttggcggggatgtggggattaaccagcaccgatgccagcttttttttgaactgttcccggatcaccggggacagttttttaaattccttcagcgcatgttcttcgaattcaagcttataagtcatccaaattgaccttaatgcgtttgccgttcatccgtgaacgaacgatttcagcgagttcgatatcttccaggtactccgcgatcgcctcccaggtttccggagagacgtaatatcccgaaatcttaccgttggtcaggacggcgaccggttgcccttgtgcctctttaagggcggcgttgggcgatttcttaaaatcgctgatgctgactgccgagtcggcaagaatgggttgaaccgtcatgatgttatccttgatgctaaattcagtatcaaatttagcactaaccggatggggtggcaattagatggagccgccgaaggagggcgactccacacgcggacttactgcgggaaccacttgtcgttgatggctttgtaggtgccgtcggccttgatggcgtccagcgcggcgttcagcttggccagcagcgcctggttgtctgggcgcaccgcgatgccgagaccggtgccgaagtattgcgcatcggtgatgtgctcgcccaccggcgccagctgcgggttggttttcagccattcgttcaccacggcggtgtcgccgaacacgccgtcgatgcggccgtttttcagctccagaatggcgttctggtagctgtcgtaagaaacggtgttaatctccggatgcttgtcctgcatgtatttctggtgggtggtgccgttttccatgccgagctttttgcctttcagatccgccagcgagctgaacttgcctttttgcgcgatcacgatcgccgagttggcgtagtaaggctgggtgaaagcgacctgtttgctgcgctccggcgtgatatccatgccggaaatcaccgcatcgtatttcttgaatttcagcgcggcgatcaggctgtcgaacgcctggttggtgaaggtgcactgcgcctgcatttgcttgcacagcgcgttggccagatcgatatcgaagccgacgatctggttgttggcgtcgagcgattcgaacggtgggtaggtggcggaggcggcgaagcggatggtttcggccgcggtggcgttaaaggtcatcccggctaacatcgtcgcggcaagcagcagttttttcatgcgtagagctcctgtctggatcctgaaagtgattattcgctatcgtttgtttttactggtaatcgccagaggtttttgcgcgaatgcctgttgttaaccctgccattgagtgaattaaaatgcaatataaatgattaagtattgccttgaggataaaaaaagccccgcacaatggcggggctcatgggggcggcggcctcagttgcgacgctcaaacgccagcgcgcgacgctccaccaggcgcatcagcagcgtcagcaggccgttgacgcacaggtacaccaggccggcggcgccgaacaccatcacgtcgtaggtgcggccgtacatcagctggctgtagcccatcacttccatcagcgtgatggtataggccagcgaggtgcttttgaacaccagcaccacttcgttggagtaagacgacagcgcgcgcttgaaggcgaacggcagcagaatgcgcagcgtctgccggcgcgacatgccaagcgcttcgcacgattgccactgcccggcgggaatggcgcgcaccgcgccgtagaacaactgcgtggtgtaggccgcgctgttcagagccagcgctatcatcgcacacagccagggctgcgacagcaggttccacagccaagggtagtcgcggatcgccgggaactggccggggccgtagtagatcaggaagatctgcaccagcagcggcgtgccggtgaacagcgtcacataggccttgaccagcggcgtcaggatcggcgttttcagcgtcaggatcaccgtcagcagcagcgacagcaccagcgcgacgatcagcgcggcgacggtcagcgtcaggctggtgtgcaaccctttgaggatctccggcaaatattcaatcatcaggccggcccccgctcaaagcgcgtggcgcgcagttcaatgcgcttgatgacgtattggctgaacagcgtcaccagcaggtagatggccgccgcgatcacgtaccaggtaaaaggctcctgggtgcgggtggcgatgctcttggtttgcagcatcagatcgttcacgctaatcagcgacaccagcgcggtgtctttcagcagcaccagccactgattgccgaggccgggcagggcgtggcgccacatctgcggcatgatcaggcgaaagaagatcgccgctttgccgagacccagcgcctgaccggattcccactgcccctgcggcaccgctttgagcgcgccgcgcagcgtctgcgaggcgtaggcggaatagagcaaggccagggcgatcaccccgcacaggaacgggctgacttcgaaattgtcgatcgccaactgaatcggcagctggaacagaccgaggttgagggtaaagccgtcggagagcatcagcagcagctgcgacgagccgaaatagataaacagcaccaccaggatttccggcaggccgcgcaacacggtcacccaggcggtgccgagccagctgaccgctttccagcgggacgattcccatacggcgaacagcatcgccagaatcagaccgaggatcagggcgcaaacggcaaggccgacggtcatgccggcggcgcttgctaaaggttgtaattcattcatttgggcgtattactgctggaaccattttttgtagatggtttcataggtcccatcctgcttgatcttgtccagagcggcgttgaacttgccctgcagatcggtgttcttctggcgcaccgcgatgccaaggccggtaccgaagtagtctttgtcggtcactttggcgcccactgccgccagcgcgtcattctgcttcagccactcgttgaccaccgcggtatcgccgaacaccgcatcaacgcggccgttcttcagatccaaaatggcgttctggtagctgtcgtaaggcacggtggtgatttccgggtgcttgtcagtcaggtatttctggtgggtggtgccgttttgcacgccgactttcttgcctttcagcgccgccacgtcggcgattttgcctttctgcgcgatgaacagcgccgagttatcgtagtaaggcttggtgaacagcacctgcttctcacgctctggcgtaatgtccataccggccatcaccgcatcgaaacgcttgaacttcaggctcgggatcaggctgtcgaacgcctggttggtgaaggtacattcggcctgcatttctttgcacagcgcgttggccagatcgacatcaaaaccctgaatcttgttgccggcgtcaataaattcaaacggaggataggaggcttcggtagcgaaacggatggtttcggctgcggaggcggaaacgctgatgccggccagaacggcggcgattattagttttttcatcgcaaactccccaaattacagcaagttaattgttagtgtgataagtaattagcaaactcggtggtccgcggctgcgtgaagtggctgctgtcgccttgctccactacgtggccgttttccatgtacaccacgcggctggcggttttgcgcgccacttccacttcgtgggtgacgatcacctgcgtgatgccggtgccggccagttcgcgaatgatgctgacgatctgggcggtgatttccggatccagcgctgcggtcggttcatcgaacagcaacacctgcggctccatcatcagggcgcgggcgatcgccacgcgctgctgctggccaccggaaaggtgcagcgggaagcgatcggcgaagtcggtcaggcgcagacgcttgagcagcttgtcggcgcgctccatcgcctgagccttggtcagacccagcacgcggcaaggtgcctcgatcaggttctgaaccacggtgaggtgaggccacaggttgtattgctggaacaccatgccgacgttttggcgcagttcgcgaatggctttctcgcccggcgcctgcctgaagtcgaattggttgccggcgatctgcagttggcccgaacgcggcatttccagcaggttcagcacccgcagcaatgaacttttcccggcgccgcttgggccaagcagcaccagggtttccccggctggacattccagcgtgatgtcaaacagcgcctggtgagcgccgtaatagcaattgataccgttaagttgaatactcatgcgccagaattgaatagacattgatgccgcaaatgttaacttccacagaatacttatgcaatctttgtgcgttaaaatttatgagtgtgcggcgggacagtaaaagattagcacaagataccgcgactcaagccgagggaggggatttgtggcgcaggctgtgagatcggtagcgaaattttttctattggacgaaattcgagcggtagacgggcggcgggatgaccgacgcggcaagcccgcgtcggccgggggaagcgggttactggttttccagcacctggcgtacgctgccgttggtggcgtgcgctggaacattcaggtagcgaatatcatcaaccacccagcaggtgccttcgcgcaccatcagcacttcgtcctgccagttcacggtgctgttggcgtctttctggtagctcaggtcaacgcgcagcgggatgttcttcgcatcggtgttaggaatggtcgaggcgctggcgacggatgcgctgcttggcccctgcgcattgccggagaacagatcgccggtaatctgatgcttgcccgggttttgagcggtgctgaccagatcctgatacagcactttgctcagataaggctgcagctgcgccaggcggttgctgtccggcaggccggcgccctgctggatgcgcaggtcatagaacttttgcgcgaccgtatccgggccgccttccacacagctgccgctgcgggtgccgatatccttgtatgccggttccaccgtggtacaggcactcagcaacagcgctaagggtaaaacagccgcaatcgtttttgttttcatcttattaccttatgtgaaagtctctaccatgaagaccgatagcttacagtataaatgcgttttttggccttgcattcgtactgcgtgccattgattaagcgaacataatgtcaatcttctggtcatagatacgttgaattaatcaaacaaggagttctgatgcagctttcaactaccccgaccctggaagggtttaccatcaccgaatactgcggcgtcgtcaccggcgaagcgattctcggcgccaacatttttcgtgatttcttcgccggcgtgcgcgatatcgtcggcggccgttcgggcgcttacgagaaagagctgcgcaaggcgcgactgatcgcgttcgaagagctggaagaccaggcgaaagagctgggcgccaacgcggtggtgggtattgatatcgattatgaaaccgttggcaaagacggcagcatgctgatggtgaccgtcagcggcaccgcggtgaaagtgagccgctaacgccatgctttcttttcgccccggccattccgccggggcgacatcctcttgatttatcccaccttgtgctgctcgacgattgggcggtgttcctgcggcttcgtgggcaccggctcctggcgatgcggcatcggctgaacggacgtctgatggagctgcggcgccggggccgcatgcggcatgatgcgctgttgcggcgccggcattgggcttatcgccgccggatgctgcggcgctgccggttcgcggatcaccggctgagcgacgtgcggagccggctgaatctgcgggcgcgcgacggctggatgcatcgccgcagcggccggcatcggatgcgtctgcagcggcgctgaatgtacggctgtcggctgctgtgggtgaggcgccgtcggaacggcatgcgtgaacgtcggcgtgctcatcggctgctgtgcatggggcgcgatgaccggttgttgcacgtatggggcggccgctaccggcgggggtacggttatcggctggtgtacgtgaggcgccaccggctgagtatgcgcaaagttcggcatggtcatcggcgcgtgggccgcaggcgcgacgcgcggcagttgcggcgcagcgttaggcaccggttggctgaaacgcggcgccggcgcggcggcggtattgtagttgttcaccgtgctggtgctgctgcgattcacagtgttcacgttgttatattggttgatgttagtgacgcgattcaccacggtggtggaatgcgatacgtaaggcgcattgcggtagaccaccggctggcgccgatcgtcccagcgcatatcccagttgtgccagccgctgttgtgttggttgagcaaagaggccaccgcgatgccgacgccgaagctgatcacgccggccgccagcatgtcgccgccgctgtagcccgagggctgatactgatagctcggataggcctggatcggcgtgccgtaggcctcccagggatcgtaatgcggaacgtaaaccgtatccggctggctgggttcgataacgatggtcccgcccggcgccgccaccacgcgctggcgatagggctgctgttcgacataacgcgtcgtcggcgccacgacgatgcgctgctgcggggtgtttttcagcgtgccctggctggccgcccgttgacgcatcacctgaatggcgttcatcacgtcggtgggatcgttcaggtaggcgctgcccagggtggtggtccaggggatgtttttcgccatttgatcgagcacgtcggggaattgcaccaggccgcgcacgctgggatcccagggctgagcgtcggccgccgagctgagcgccgccggttgcaagccgcggttttgcgccagccaggcatccgcggcgctgatttggtcaggatagcccgcgccggccaacacctgcgccagcagcttgtcggggaacagcgccaccgggctgaccaactggtacagttgatcggcgctcagcggcgtataggccggcgcgctggcactcgtgacgggcgcggccgagggcggggcgctcccgcccatcgcatcggcgactttttgccgatcgcagccgctgagcggcagcatgacggcacagagcaaccaggacagatagcgtggcgtgaacatgttcgactccgctctttcagcgcagatgatactttgagactatcatgggcgggaaaggccgccagccgggagcaacactcgcttgcacatcggcgctctctgtcattatttctcgatgagcgtgatgattggatacagatcaatcgcgtcgcgttacatctttcacggacgtcaatcaggaggataagtgaaaatttggccagggatcatcgccgccgcgctgttggcgggatgccaaaatccgcagcagaacacgctcgtcgatcgtggcgcttaccagctcgaaaccttgcatcaggcgcagggcgccgatcagcgtattcggtttctggtgatgcactatacggcggaagactttcattcatcactgaaaacgctgaccgatgaacacgtcagcgcacactacctgttgccggcgcacccgcagcgcgaacacggcaaaccgacggtgtaccggctggtgccggaagcgatgcgcgcctggcatgccggtgccagcgcctggcgcggccgcagcaatctcaacgacacctcgatcggcattgaaatcgtcaacaaggggttcacccgcagcatgctgttcacccattggcagccttatacggcggagcagatcgccgtgctgattccgctgagccgcgacatcatccaacgctatggcatccagccgcaggacgtggtggggcacagcgacatcgcaccgcagcgcaaacaggatcccggcccgctgttcccctggcgacaactggcgcaggccggcatcggcgcctggccggacgaggcagacgtgcagcgtttgctggcggggcgcgatcgtcatgcgccggtgccgctggcgccgctgcttgataagctggcgcgttacggctacgcggttgattcgtcatgggatgcgcggcagcagcgcaatgtgctggcggcgtttcagatgcatttccggcccgacgatgttcgcggtgaaccggatgcagagagtgaggcgattatcgatgcgctgctgttgaagtacggcgcgtggcgttgattacaggccgtgcagtttgccgtgatctttcagccagcgggcggtgcgcgcgatgccttcttccagcgagacgatcggctgatagcccagctcttgctgcgcgcgggtggtatcgagcgtgaggtcgaagttgagtttggcgacgccgtaatgggtcagcaccggctccttttcgcttttgctgcccaggcgctccatgccgcgcgccatcatgtcgagcatcggataggggacggagcggatgcggcacttcatgcccaaatcgtcgatcagttgctgcaccacggtgcgcagcgggcgcggctgctggttggtgatgttgtaggcgcggccggacggcgtgtcttcttttagcgtcgccagccacatggcgtgcaccgcattctccaggtaagtcatgtccaccatcgccgcgccgccgcgcggcagcagcaggttgccgtagcgtttgatcatctgcagcagccgcggcagcatcaccttgtcgtgcggcccgaacaatccctgcgggcgcagaatggtgaaatgggtctgcggattggacagcgccagttgctggatcacctgctcgccggcggctttgctgcgcgcgaattcgttggcgtagcgctgcgggcgaaagtcttcggtcacgttgcggtgatggtggtagtcgaaatagatcgccggggaggagatgtgaatgaactgcgccacgccataggccgccgcccattcaccaaggcggcgagtggcgcggacgttggccagttcgaaggcttcttcggtgccccagggcgaggtaaagctggagcagtgccacagcacatcgacgtccgccagcatcgctttggcctgcgaagagatcaggttggtgagatcggcatgaatgaactcagcgcccattttttccagcaggccgcccatcgcctggttgcggccggtggcgcgcactttgatgccctggcggcgcagatattcaacggcgttacggcctaacccactggtggcaccggtgaccaataccttcataacggactctattctcacccaaaatcggaataccggcgggcgcttgcggcgctcccagcaaataagatgccattcttccgtgatttcgtgcgctatgcaatcggaaagccccgaagcacagcggcaaactgtgcggttgatcgacaaatgagcgccgttcagcgctgttggcggtccagattctcggcaagctcggcgatgcgcttcgccatgccgcgaaaaataaacagatgcgcgggcatcatggcgaaccaatacagcagcccgctgaagccggccgggtgccaccaggcgcgcacgtccagcgtgcggcgatcgccgcgatcggtgatggtgaagctcagccgccccaggccgggcgccttcatgccgaacagcagcgccagctgccgcagcggcttcagcgtgatgactttccagccgtcgatctcgtcgcccagcgccagggccgcgcgcgccgggcggccatagaccacgccgttgccgatcatgtcgtccatgcgggcgcggatccgccacaggatattggcgtagaaatagccttcctcgccccccagctgctgcaccgtttgccacagggcctggctggaggcggcggtgtcgagcgaacatcccgcctgtttcgggtaatagccgtagccggggcgccagcgggcccgcgccgccggatcgtagccccagtcggcggaatcgaccacctccagttcgcgctgcagcgtggcggtgaccgcctgatcgaaggtgtgcagacgttgcgggatcagggcctgcaacggtttgccgtcggcgggcagatcgtgcttcaggccctggatcagcgcgcgcgcgatcggcgtcggcaccgaggtgatcaggctgatgaaccacactgaaatcagccgcgtcggcagggggatcgggatcagccagcgccgcttgccgctgatggcgataaagcgtttgaacatatcctgatagctgaggtattccggcccggcgacgtcaaagatgcggtgttcttgcgccgggtgcgccagcagatcggccaggtaaaccagcaggttctccagcgccaccggcgaggacttcgagcgcacccagcgcggcggcgtcagcaccggcaggttatagaccatgtcgcgcatcacttcgaacgccgccgagccggggccgacgatgatgccggcgcgcagctcggtcaccggcacgccgctctggcgcaggatctcgccggtcaggcggcgggccgccaggtgcggcgaactgtcgtcgttcggctgcagcgcgccgagaaagatcacctgcttgacgccggcattgcgcagcgcgtcacgcagattttccgccgcctggcgctccttttcgataaagttgtcgccgtcgcccatcgcgtgcaccagatagtacagcgtatcgatctcccacagcgccgcgctcagggtttccgggcggtacagatcgacatacaggcagttgacctgcggccagttctgctcctgcagccactcgatgcgccgcgcggcggcggtaatctggtgcccctgttcgatcaggtgcgggatcaggttctggcctatatagccgctggctccaagaaccagtacgcgttggggtgtcatcgggccgccttgtgcggtgaaagagtcgcagaacgacaggatgccaaattcagggtttaaatgcactttttgtatgggtataagccagttgcatccgccgcggcgcaggttcacactacgcgccccttatcgaacgaagaccggatgtcatgaagctcaatgtgatttgttacgccctgctgggcctggcgctgatcgccagcctgttctcgccgcatccggtgtggatggggttgctgctggcgaacctgctgacgtttctgatctacggcggcgataagctggcggcgcgcaagggatggcgacgggtgccggagacgacgctgttgctgtttggcgcgctgggcggctggttgggcgcgctgctggcgcagcagctgtttcgccacaagacccagaagcagccgtttaaaacctggtttattctcagcgtggcgctcaacctggcggcgctgctggggctgtggtactgggtttacggccgctggatcttctgattgcggggcgcggcctgcgccccaagcgatcaggcgtgctgctgaagaaactcccgccacagttcgaccacccgctgcagatcctgacggctgacgtcgaggtgggtcagaatgcgtgtcagcgggccgctgctgatcagcacgccgcgttcgcgcatccacggatcgaatttggccaccagcgccggcgtttggcgcaggtacagcacgttggtctgcgcgccgggagcggcgatctccacgccgatctgccgcagctgttgctccagccaggccgcgttgtcatggtcttcgcgcagccgcgcaacgttatgctccagcgcgtagaggccggccgccgccaggatgccggcctgacgcagcccgccgccggtcatcttgcgccagcgcagcgcacgctgaatgaaggcctcgctgccgcacagcagcgatccgaccggcgcgcccaaccctttcgacaggcaaatggtgaaggtgtcgcagtattgcacgatctctttcagcggcaggttcagcgccacggcggcgttgaagatgcgtgcgccgtcgatatgcagcgccagctggcgctcgcgggtaaactgccacgcctgctgcaggtaggcctgcggcaggactcggccgctgatggtgttttccaggctcaacagccgggtgcgggcgaagtggatatcgtcgggtttgatggcggcggcgagcttgtccagcggcagcgtgccgtcggcgtcggcctcgatcggctgcggctggatgctgcccagcaccgctgcgccgccggcttcgtatttgtagttgtgcgcctgctggccgaccagatattcatcgccgcgctggcagtggctcagcagcgccaccaggttggcttgggtgccgctgggcagaaacagcgccgcttctttgcccgacagacgcaccgcctcggcctccagcgcgttgaccgtcggatcatcgccgtagacgtcgtcgccgacttctgcctgagccatcgcctggcgcatggcggcgctggggcgggtaacggtgtcgctgcgtagatcgataagcatagggttcctggaatgtaagggagaggaaaagggtacatggcatcatataccctttattttaccggggcagcttgcttagcgcagccagttggttttcgccagctcgaccacttcgtcgccgcggccgttgatgatggcgcgcagcatgtacaggctgaagcctttcgcctgttcgaacttgatctgcggcggcatcgccagctcttgcttggcggtgaccacgtccagcagcgccgggccgggatgcgccaacatctcctgcagcgcgccgtccagatcggaggctttttccacgcggatgcccttgatgccggcggcgttggcgatcgccgcgaagtccggattatgcaggtcggtgccgtcggtcaggtagccgccggccttcatctccatcgccacgaatcccagcacgctgttgttgaacaccacgattttcaccggcagcttgagctgcgccagcgacaggaaatcgcccatcagcatggtgaagccgccgtcgccgcacatggcgatcacctgtttatccggcgcggtggcctgagcgccgatcgcctgcggcatggcgttggccatcgaaccgtggttgaacgaaccgagcaggcggcgcttgccgttcattttcacgtagcgggcggcccacaccgtcggcgtgccgacgtcgcaggtgaagatggcgtcgtcgctggcatagtggctgagctgctgcgccagatactgtggatggatcggttggtcgtcgccggcggtcgccagcccgtcgagatccttgcgcgcgttgcggtaatgctccagcgccttgtcgaggaacgcccgatcgcgcttcggctccagctgcggcagcagggcggtgagggtggtgtggatatcgcccaccagcgccatattgaccgggcagtgcgcgccgatgctgccggggttgatgtcgatctgaatgatgttggcgttggtggggtagaacgcgcggtaggggaactgggtgccgagcagcaccagcgtgtcggcgttcatcatcgcgtgataaccggaggagaaaccgatcagcccggtcatgccgacgctgtacgggttatcccattcgatatgttctttgccgcgcagcgcgtgcaccaccggagcctgcagcagttcggccagcttgaccacttcatcgtgcgcgccggcgcagccgctgccgcacatcagggtgatgttcttcgccttgttcagcgtttccgccagcttgttcagctcgctcatcggcggctgcaccagcggcagcgccggggtatgccaggtcacggccgcgtcttccggcgccatgcgcagtgccacgtcgcccggcaagacgaccaccgacacgccgcgattgaggatcgccttgcgcatggcgatctccagcacgcgcggcagctgttccgggttggagaccagttcgcaatagtggctgcattcgcggaacagctcctgcggatgggtttcctggaagtagccgctgccgatttcgctggaagggatatgcgcggcgatcgccagcaccggcacatggttgcggtggcagtcgaacaggccgttgatcaggtgcaggttgccggggccgcaggaaccggcgcacaccgccaactggccggtaagctgggcttcggcgccggcggcgaaggcggcaacctcttcatggcgggggcccagccattcgatggtgcccatgcggtgcaggctgtcgctaaggccgttgagcgaatcgccggtcacgccccaaatgcgttttacgccggcttgatccagcgttttggcgatcagtgtggctacggtttgcttcatggttcccccaaacaaggtttgaaaaacgatgtggactcgatccggtgagtggcagcagaacaactgcaagcatagcttaccggctgtggacgagatgcggtcaggaagggtaaagagcgtaggacggggaaaagtgtaaccgggctggccgcggggagcttgccgataaatgccccatcgcggcgatggggccaggggatcacgccaatgtgacgtcgccctgcagctggcaactgcaggccagcacgtagccttgcgctacttcttcctcgctcagcgtcatggtgctggtggtggtgtagtcaccctcaaggatgcgggttttgcacgagccgcacaccccggcgcggcaggcggcgttgaccggcagggcatgggcctccatcgccgccagcagcgtgctgccaaccggtacgcggaattcgcgcagcgggcgcgcggcgcgcagcgtcagcccttcggtggcgtcggcctgcgccgccggcgtgtggaactgctctttatggaaacgctcggccggcacgccgagccggcggcacagctgctccacctgatccatgtagggcgcagggccgcaggtcatcaccgtgcgttcggcgatatccggcgccgcctgccgcagcgtctgttcatcgatgcggccgctgaggtagccgggttgcagatcccgctcggccatcagcgtcaggcgcagctgcggatgggcggcgcacagtgcgcgccactgatcggcgaaaatcgtgtcggcgggggtgcgcacgttaaagatcgcgacgatatcgcaggttggacggttggcggtcagccagcggcacatcgagacgatcggcgtcacgccacagccggcggccagcatcaggtaacgatcggccgggtggcgctcgcagctgaattcgccctgcgcgtcggacagccacagggtgttgccgggcttgacctcttgcgtcagccagcgcgatccgacgccgtccggcaggcagcgcacgctgatgctgagaaagcggctctggccgggcgaggaggagagcgtataggcgcgcagcgtctcctcgctgttgcggatgctgaccagcgcaaactggccggcctggtaaggatagaaaacgtcgcagatcaggttcagcgtccagacgtcggcggtttcacgctggatggaatgcacctgcatgcggttcgggcaaagcggagtgggttgagtcatcggggcacctcaaaaagcaaaggggccggcgcaggcggccccataacgtaacggcatcaggcgagcagcgctgcgatatcctgctcgacggtagtgatcgggcgcaggccgaatttctcgttgaggatcgccatcaggttgtcggtcaggaagcccggcgcggtcgggccggtgacgatgtttttcacccccagcgacagcagcgtcagcagaatgacgatcgccttctgttcaaaccacgacagcaccagactgagcggcagctcgttaacgctgcagccgagcgtatccgccagcttgaccgccaacatgatggcggagtaggcgtcgttgcactggccgacgtccagcaggcgcggcagcccttccagcgtgccgaaatccagtttgttgaaacggtatttgccgcaggccagcgtcatgatcaggcagtcttgcggcacgctgcgggcgaagtcggtgaagtagctgcgctcgtcgcggctgccgtcgcagccgccgaccaggaagacgtggcgcagttttttctgcgacaccaggtcgatgaccgtgtcggcggcgttcagcaacgtctggcggccgaagccgacggtgatcaggtgttcgatctcggtgtaagggaagccgttcatgccctgcgcctggcggatcacggcgccgaagtcgtcgccttccagatggttgacgcccggccagccgacgatgctgcgggtccagatacgatcgccgtagttgccgacgttaggatcgatgatgcagttggaggtcatcacgatcgggccggggaatttggcgaattccgtctgctggttttgccagccgctgccgtagttacccaccaggtgcttgaattttttcagttccggatagccgtgcgccggcagcatttcgccgtgggtgtagacattgacgttttgcccttcggtttgctcgagcagcatgcgcagatctttgagatcgtggccggaaatcagaatggctttcccggccaccgggcgcacgttgaccgcgctgggctgcggatcgccgtaggcctgggtttcaccgcgatcgaggatcgccatcacgttgaagttcatcttgccgatgcccatggcgttgttcagcagggtatcgacgtcgcgcggccgggtgccgagccaggccatgaaagcgtggtagtcggcatagagctgttcgtcgaactggccgagcacgtgcgcgtgttccatataggccgccgcgcctttcaggccatacagacacagcaggcgcaaaccgtgtacgtcgtcgccgacctcggccttgtcgctgtcgagggcaaactgcgccgcctgctgcagcagcgcaggcatagcgtcgccggccagctgcagcgccgccatcgggtgatcgacgcgcacgccggcgtccagcagccggcaacgggcggccagcgagtcgcgcagcagcagggtttcccgcgcgtagccgatgatgcgctgggaatcgaagttgacgttggtcagggtggagaagaaggcgcgcggggcgaagctgtcgatttcgtggtcgacgatgcccagcgaacgcgcctgcagcgcccaggcggagaggccctgcagcgccgccaccagcagatcctgcagatcggaggtttccgccgttttgccgcacatgccctgagcatacgcgcagccgttgcctgccggggtacgaatggtttgttcacattgcacacagaacatagtcgcttccttttatttttaaagttgcatttataatgcttgtttaaaagcatagatcggcgatcggggttgcaaaaggcttttgtgcgactactgcgggcaagtttgatttagcgcaattttgcggtgcggatgggaatgattacgctttgggggccaggcggcccccagggggaaaggatcaggagaacagggcgatcagcaccggcgccagcaggctcagcaggaagccgtgcacgatggcgggcggcaccatgtccagcccgccgctgcgctgcagcaccggcagggtgaagtccatcgaggtggcgccgcacaggccgagggcggtggagcggctgcggcgcaccagcgtcgggatcagcatgatcgccaccagctcgcgcgccagatcgttgaagaacgcggcgctgcccatcaccgggccgtaggcgtcggtgatcagaatgccggacagcgagtaccagccgaagccggaggccatcgccagcccggccttgaccggcaaccccagcagctgcgccgccagcgcgccgccggccagagacgcgacgaccaccgccaatgccaccagcgtgccgcggcggttgagcacgatctggcgcagcgtcatgccgctgttgcgcagctgaatgccgaccagcaacagcaggaagatcagcgcatattcgctgcctttatgggcgaactgcagccattgccactgcgtcaggccgagcaggaagccgccgagcaccacgccgcacagcttgagcgactccagcgccatgtgcacgcgcgaaggcagcttttcctgtttatggctgctgcgccacggcatgcgccgctccagcagcgccagcaacagcaggttggcgcagagaatgcagaagaaaaacactgcgctgtactggaagatcagcaccaggttgctgctgagattctccataaacgccaggctgatgcccatgaaaaacaggatcacgtacaccatccagctgagcagccggttgatcagcaccagcagcgggcgatggcgtaagggaatgaggtaaccgacaatcagcggtaacagaataatcaacagtcctgagtacatggtgcagcttgtgtccttgagttttgaagcgcgccgaacgccgacgaggagcacacgctaaccaaaagcccggccggagtaaagcggcagatttgacgttggccgcttgacctgcaaggggttttttgaccatgctctgtgaaggtcacctcattgaagaggcgacggcgcgcacgggaggcggcggatgttcttggagcgtatcgaaattgtaggttttcgcggcattaaccggctgtcgctgatgctggacgacaacacgctgttgctcggcgaaaacgcctggggtaaatccagcctgctggatgcgctgacgctgctgctggcgccggagcagaagctgtatcggtttgaagcgcacgacttccatttccctcccggtgaggaggcggccaaagagcgccacctgcaggtggtgttcaccttctgcgaaaaagacatcggccatgcgcacctgccgcgctatcgccacctgacgccgctgtgggtcaagggcgaagatggcttgagccgcattcattaccgctgcgagggcgagctggccgacgacggcacggtgtgcacctggcgtggttttctcgacgccgacggcaacgcctttcaactgcaccatatcgaacaattggcccacgccattatccgcatccatccggtattgcgcctgcgcgacgcgcgctttattcgtcgcctgcgccccagcagcctcggcgatgaacgcaaacccgatacccaggcgctggcgcagcagttggatcagctgacgcgcgagctggtgcgtaatccgcagaagttgaccaacggtgagctgcgtcaggggctggcggcgatgcagcaactgctggagcactatttcgccgagcagagttcacaggtgacgcggccgcgccgccgcggcggtgaaccggagcaggacgcctggcgcgcgctggacggcatcaaccgcatggtggccgagccgaacagccgcagcatgcgcctgatcctgctgggcatgttttccaccctgctgcaggccaagggcgacgtcaagctggatccccatgcccggccgctgctgctggtggaggatccggaaactcgcctgcatccgatcatgctgtcggtggcctgggggctgctcaatcagctgccgctgcagcgcatcaccaccaccaactccagcgaactggtgtcgctggtgccggtggagcacgtctgccggctggtgcgcgagtcggggcgggttgcgacctaccgtctcgggccgcgcgggctgagcgccgaagacgggcggcgcatcgcgtttcacatccgtttcaaccggccgtcgtcgctgttcgcccgctgctggctgctggtggaaggcgagaccgaagtgtggctgctgaacgagctggcgcgccagtgcggctaccatttcgaggcggaaggagtgagggtcatcgaattcgcccagtgcggcctgaagccgctgctgcgcttcgcccgccgcatgggcatcgagtggcatgcgctggtggacggcgatgaggcgggcaaaaagtacgctaacaccgtgcgcagcctgctggacaatcatgaagacaacgaacgcgatcggctgaccgcgctgccggcgccggacatggaacacttcatgttccgcgaagggttcgccccggtctatcaccgaatggcgtcggtgccgatcaacgcgcagatgccggtgcgcaaggtgatcctgaaagcggtccaccactcgtcgaagccggatctggcgatcgaggtcgcgatgcaggccggcgaatggggcacggactcggtgccgccgctgctgaagaaaatgttctcacgggtgatctggctggcgcgcggccgggcggactgacggcccgccgggcgttatcgggcgcagaaatgcgccgccaatccctgttccagttcgtccagcagctgatagcggcggcgatactcggcgcgcttcttgctggcaatttcttcgataggtttgcgggcgatgcgctcgggcagcaggaaatagccgctgtcgagcggtttggcgcccatcgacagccagaactgatcgtaatcggcgtgcagttggtccttcttcttactctggtagcgccagttttgatagatatgggtggcgttgccgacggctacgatccggcggatgccgagatgccgagccagcgtgcaaacgccttccagcaccagacgtttagggaacagaccgtgacactccttggtggtgtgctggatctcggcgtgcggcacgtcatggttcgcgccctgcaggccgccgatgaacaacgtcggctgctgctgataatgcatcagcgcaaaggtgatctccgccagcatcacgccgttggcgttgcgcagcagcaacgtggcttccccttccttattcagtttgtcgatcgccgccagttccagcgagatcggcgcttcgtttttgcccatcgcgcgggccagcacgaaaggctgtgggcctaggtggccgagacgcatcttcagcggcatgcgctgtacgatgagatcgtaatgatcgcgcagggcgaacaagcattcgatcttgctcatgttggccgccaggtagggacgatgcagtttgcacggcaggttcggctgcgcgttcaggatctcttccagcagcgggttgctggccagggtgctgagcaggccgctggtggtgcgccagttgagcagcgaacggccgagaaacttcaggcgaaacgaggtttttttccaggcgttgcttggcgccttttcgccattgatcagcgccgtcatcagttgccagccgttaagcggccggggggaggcgagtgggtagctgagctgtgacatgatgaaatccttggctgtgttgaatggcggtatttcatcaaggtttcactaaacgggagttcaatgctgaactgtaaccaggcgtgtctccacattgtgttgagctaaggtttagttattccctacgttgcatgctaatttagctccgccgccgcaatgggcggtcgatattcacaagcacaggcaggtcaattttgacagggtttaaaggacataaacgccgctggatactcgcactggcggtgattgcggcgcttgccgcggcggccgtttggcactttcgccatccggcgccgaccgatttcaaaacggtgaaggtcacccagcgcgatctgcagcagaacgtgttggcgaccggccagctggacgccgtgcgcaaggttgacgtcggcgcgcaggtcagcgggcagttggaaaaactgtatgtcgagatcggcgacaaggtgaaaaaaggccagttgctgggggttatcgatccgcaacaggcgcagaacagcatccgcgaaggcgaggcgacgctgcgcgaactgcatgcgcagctgctgcaggcgcaggcggaacagcagctggcggcggtcacgctgcagcgcaaccaggcgctggccaggctgcaggcggtgtcgcgtcaggatttggatcaggcggcgacgcagctggcggtgaagaaggcgcaggtgggcaccatcaatgcgcagatcgcccgcaaccaggccagcctggataccgccaagatcaatctggcctatacccgcatcgaagcgccgatggatggcgacgtggtgcagattaccacgctgcagggccagacggtgatcgcggcgcaacaggcgccgaacattctgacgctggcggatctcggcaccatgctggtgaaggcgcaggtctcggaggccgacatcattaacctcaagccgggtcagaaggcctggttcacggtgctgggcgatccgacccggcgcttcgacggcgtgctgaaagacattcagccgacgccggaaaaggtcaacaacgccatcttctattacgcgcgtttcgaagtgcccaacccggaaaggctgctgcgcttgcaaatgacggcgcaggtgcacattcagttggccggcgtccagcaggcgctggtgatcccgctggcggcgctgggcgatcagatcgccgacaatcgctaccacgtttcggtgctgaaacagggcaaggaagagaagcgtgaggtggccatcggcctgcgcaacaatatcgatgtgcagatcctcagcgggctcgaggcgggcgatgaggtgatcgtcagccgcggcggcgtggaggccggctgatggcggcgctgttgcagctgaacggcattcgccgcagctaccgttccggcgagcagacggtggaggtgctgaaggggatcagtctgagcatcgacgccggtgaaatggtggcgatcatgggggcttccggctccggcaaatcgacgctgatgaacattctcggctgcctggacaagccgagcgccggcgtgtatcgggtagccgggcaagatgtggcgatgctgagcgacgatgcgttggcgcagctgcggcgcgagcatttcggctttatctttcaacgctatcatctgctgccgcacctgagcgcggcgcacaacgtcgaggtgccggcggtgtatgccgggctgggcaaagcggcgcggcgcgaacgggcggaagcgctgttgcgccgtctggggctgggggagcgagtcaactatcggccgagccagctttccggcggccagcagcagcgcgtcagtatcgcccgcgcgttgatgaacggcgggcaggtgatcctggcggatgagccgaccggcgcgctcgacagccattccggcgaagaggtgatggcgatccttaaacagttgtgcgcccaggggcacacggtgatcctggtgactcacgatccggctgtggcgcgtcaggctgaacggatcatcgagatccgcgacggcgagattatcgccgactcgcggccggcaccgcaggagaatgcgcaggccaagccgctggcactggccgccgcggcgccttcctggcggcagatgggcggccgtttccgcgaggcgctgatcatggcctggcgcgcgatggcggccaacaagatgcgcaccgcgctgaccatgctcggcatcattatcggcatcgcctcggtggtgtcgatcctggtgatcggcgacgccgccaagcagatggtgttggcggacatcaaatccatcggcaccaatactgtcgatatctatcccggcaaggatttcggcgacgacgatccgacctaccggcaatcgttgaaatacggcgatctcgatgcgctgcgcgaacagccttacatcagtgcgctgtcgccgagcatcagcagcagcatgcggctgcgtttgggcaacgttgatgcggcggccaacgtcaacggcgtcagcgagcagttcttccgcgtgtacggcatgagctttacccagggcgtcggcatcgatccgatgcaggtacagtcgcaggcgcagacggtggtgattgacgccaatacccaacggcggctgttcccgcaccagaagaacgtggtgggggaagtgatcctggtgggcaacatgccggcgacggtggtcggcgtggccaaggagaagcagtcgatgttcggcagcagcaagacgctgaacgtgtgggtgccgtacagcaccatggccaaccggctgatgggcaacagctatttcgattcgatcaccgtgcgcatccgcgacggttacgacagcaaggaagcggagcagcaactgtcgcgactgttgacgctgcgccacggcaagaaggactttttcacctataacatggacagcctggtgcaaaccgcggagaaaaccacccgcacgctgcagctgttcctgacgctggtggcggtgatttcgctggtggtgggcggcatcggcgtgatgaacatcatgctggtgtcggtgaccgagcgcacgcgcgagatcggcatccgcatggcggtgggcgcccgttccggcgacgtgttgcagcagttcttgatcgaggcggtgttggtctgcctggtggggggcgcgctggggattacgctgtcgttcgccatcggcctggcggtgcagttggtattgccgggctggcagatcagcttcccgccggcggcgttgctgagcgcgttcctctgttccaccggtatcggcgtggtgttcggctatctgccggcgcgcaatgccgcgcggctgaatccgatcgatgcgctggcgcgcgagtaagtaaaaggcataaaaaatgccagtcacacggcggctggcatttttatcgcagtcagggtcaatgcagcgcgacgctgctggaggcgttcaggacagcgcctcgctttccaccggcacaatcagactggcatggttcccttttggcccttgatgcacgtcgaagctgacctgctgacctgccttcaacgttctgtaaccatccatcttgatggtggaataatgcgcgaaaatatcttcgccaccgccggctgggcagatgaagccaaagcctttggcgttgttaaaccatttaacagtacccgtctccatgcttttacatccctcgcaacgctattttaagtgagatgaataactgaattcgcacccgccgtgggcgggtagcagggtggacaaggggtggttaaaagaccaccagccacgaatttacactctagagcaaatgatcggggcgtcaagggatcggcttttgtcggcggggagcagttcaccaaagtttgaagcaggtaacgctattgccacgattcagtcacaattggcccgtttttttgcgcacgttacagtgcggcgggacgatggcgaagatgataaaatagtaactatccccactttgaataaccgaaacctgtccccatatcagagggcagagcagagaagatgagcagcgatgggcaataacaacgactggctaaattttgaacacttggccgaagaaaaacaaatcgatgcggtaaaaccgccgtctatgtataaagttatacttaacaacgacgattacacaccgatggaatttgtgattgacgttctgcaaaagttcttttcttatgatattgaacgcgcaacgcaactgatgctcacggtccactatcaaggcaaggcgatctgtggtgttttcaccgccgaggtggcggaaaccaaagtcgtccatgtgaaccggtacgcaagggagaacgagcatccgttgctttgtacgctggaaaaagcctgaataaggcaatctattggggaggtgcttatgctcaatcaagaactggaactcagtctcaacatggctttcgccagggcgcgtgagcacagacacgagtttatgaccgtggagcacctgttgctggcgttgctgagcaaccctgccgcgcgagaagcgctcgaggcatgtacggtggatctggccgcgttgcgccaggagctggaagccttcatcgaacaaaccacaccgacgctgcccgccggcgaagaagagcgcgacactcagccgacgctcagcttccagcgcgtgttgcagcgcgcggtcttccatgtgcaatcttccggccgcagcgaagtctccggcgccaacgtgttggtggccatcttcagcgagcaggagtcgcaggcggcctatctgctgcgcaagcacgacgtcagccgtctcgacgtggtgaacttcatttcacatggcacgcgtaaagacgagccgggccaagcgccgaatgcggaaaacccggtgaacgaagagcagtccggaggggaagaccgtatggaaaacttcaccaccaacctcaatcagttggcccgtgtgggcggcatcgatccgttgatcggccgcgatcgtgagctggagcgcgcgattcaggtgctgtgccgccgtcgtaaaaacaacccgctgctggtcggcgaatccggcgtgggcaagaccgcgatcgccgaaggcctggcctggcgtatcgtgcagggcgacgtgccggaagtgatggcggactgcacgctgtattcgctggatatcggttcactgctggccggcaccaaataccgcggcgacttcgagaagcgcttcaaggcgctgctcaagcagctggaacaggatcagaacagcatcctgttcatcgatgaaattcacaccatcatcggcgccggtgcggcttccggtgggcaggtggatgccgccaacctgatcaaaccgctgctgtcgagcggcaagatccgggtgatcggctcgaccacctaccaggagttcagcaacatcttcgaaaaggatcgcgctttggcgcgccgcttccagaagatcgatatcaccgaaccgacggcggaagagaccgttcagatcatcaacggcctgaaggccaagtatgaagcgcaccatgacgtgcgttataccgccaaggcgatccgcgccgcggtggagctgtcggtgaaatacatcaacgatcgtcatctgccggacaaggcgatcgacgtgatcgacgaggcgggcgcccgcagccggttgatgccggccagcaagcgcaagaaaaccgtcaacgtggccgatatcgaatccgtggtggcgcgcattgcgcgcatcccggagaaaaccgtgtcggccagcgatcgcgacgtgctgagaaatctgggcgatcgcttgaagatgctggtattcggccaggatcaggcgatcgaagcgctgaccgaagcgatcaagatgagccgtgccggtctgggccacgagcgcaagccggtcggttccttcctgtttgccgggccgaccggggtcgggaaaaccgaggtcaccgtacagttggccaaggcgatggatatcgagctgctgcgtttcgacatgtccgagtacatggagcggcataccgtcagccgtctgatcggcgcgcctccgggctacgtcggttacgatcagggcgggctgctgaccgatgcggtgatcaagcatccgcatgcagtggtgctgctcgatgagatcgagaaggcgcacccggacgtgttcaacctgctgctgcaggtgatggacaacggtacgctgaccgataacaacggccgcaaggcggacttccgcaacgtgatcctggtgatgaccaccaacgccggggtgcgggaaaccgaacgcaagtcgatcggcctggtgcagcaggacaacagcaccgacgcgatggaagagatcaagaaggtgtttacgccggagttccgcaaccgtctggataacatcatctggttcaaccatctgtctaccgaggtgatccagcaggtggtcgacaagtttatcgtcgaactgcaggcgcagctggatgcgaagggcgtctcgctggaggtgagcgacgaagcgcgtgattggctgtcggtgaagggctacgaccgtgcgatgggcgctcgtccgatggcgcgcgtcatgcaggaaaacctgaagaaaccgctggccaacgagttgctgttcggctcgctggtggacggcggttccgtgaaggtcgagctggacaaggacaagaaacagctgacctatcacttcctcagcgccgccaagcgcaaagcggacgagggcgcggtgcactaaggctgccttcaggcaaagaaaaagcgatgcttcggcatcgctttttttatgggtgagattcaccgtacagcagaaacgagtgagccctctcagtttacctgcgcacctgcaacccgttgtataacgtcgctgcgggggtaaacggaaagggctcccgagggatattacatcctcgatgccgccagcgtgtggcgcgcgatgagccgattaacggctacggaagacaatgcggcctttgctcaggtcgtacggggtcagctctacagtgactttgtcgcccgtcaggatgcggatatagtttttacgcattttaccggagatgtgtgcggttaccacgtgcccgttttccaattcaacgcggaacatggtgttcggcagcgtatcaagaacggtgccctgcatttcaatattgtcttctttggccatcgaatcctctaggtctaactaccttagtttttaaccggcaagataatgccgaaaaacccccattatgtaaagatgtgtcggtgaacattgcaccgtttccaccaattagtttgctgggcagggcggttcaaccggctgtggggatatgacttgcggcgcccagcacgccggtgccaaaggccgccgttgaagggtgctgagctgctgcaaaaattgacggcgcggaatttcacgcgcgccaaggcgggcagtgtgagcgttcagcacctggcagtcaatcaattccccgccataagcggcaaaatggcggcaaaaggccatcaatgcgcattttgaggcgttggtgacgcggctgaacatcgattcgccgcagaataacgcgccctgcgccacgccgtacatgccgccgaccagttgatcatcctgccatacctccaccgagtgcgcgtagccgaggcgatgaagatgttgataggcgcgctgtacctccgggccgatccaggtgccttcatccggccggtgggcgcaggcggcgatcactgaggcgaagtcgtgattaagcgtgatgcgaaacggatcgtggcgcagaaagcgtttcaggctgcggttgagatgaaactcggccgggaacagcaccgcacgcggatcgggtgaccaccacagaatcgcttcccccggcgagtaccaggggaagatgccgcgctcgtaggctgccagcagccgtggtgccgtcaggtcgccgccgatcgccagcaggccgttgggatcgcgcagggcgccctcaggcgagggaaacgccagcgactgaggggaaagcttaacgatgcgcatacagggtttctgcgtcctctacgggccgattacggcgccaggttgctgatacggttgcgaaagcgggcatagcggccctgctggcgcattagggcggcgtgatcgccctgttcgacaatttggccgtcatccattacgcaaatgcgatcgagatgctccaggccgtacaggcggtgcgtcaccaggatcagcgtcttgccctgacaatgccggcgcagcagcgccaggatctgctgctcggtctcggcgtccagcccttcggtgggttcgtcaagcaacagcagcggggcagggtgcagcagcgcgcgggcgatgcccagccggcgctgttcgccgccggacagctgccggccgccttcccccagccaggcgttcagcccgccgtcgctgtccagcaatttgccgagccccacctgctgcaacacctcgctcaggcgagcgtcgccggcatccggtgcggccagccgcaggttttcccgcagcgtatcgctgaagatatgcactcgctggctgacgaccgtggtcattcgacgcagcgtggtttcatcataatcttccagcggttcgccgttgagcagaatttttccgccgtcggtgcgccaggcgcgggtcagcagctgcagcagggtggacttgccgcagccggtgcggccgagcaaggcgatgtgttcgccggctgccacctcgagcgtgacgtcgcgcagcaccggctgcggctgatcggggtaggtgaaactcaactgccgcaggctaagctgagcccggtcggcggcggccgggccgacggccgggaaggagacttccggttggcgatcgatgatctgtttgacccgcgtggcggaggcgatcacctggccgaggtgctggaaggcgccggccaccggcatcagcgcttcgaacgacgccagcgcggcgaagacaaacagcgcgatcagcgcgccgggttgggtatcgccgccgatgccggcggcggtcagccacagcagcagtgtcaccgtcagcccgctggcgaggatcatcagcgcctgcgccttgccgctcagcgaggcttgctgccactggcggcgttgccacagctgttcggtggcgttcagcgtctggcggaagtcgttgacggcgccgaacaccaccagctccgcctgcccctgcagccaggcggtcaggtcggtgcggtattggccgcgcagggcggtgagttgcccgccgatcggtttgccggcgcgatagaacaccggcggcaccagcagcaacagcagcaacagaatgccgccaagcgtcagggcaagcgcaggatccagccagctcaggccgtaggtgaccaccaggatcaccgccgccgcgcctaccagcggcgagatcacccgcagataaaggtgatccagcgtgtccacgtccgccaccaggcgattgagcaggtcggcctggcggaaacgggcgatgccgcccggcgtcagcggcaggatcttgctgaaggtgaacacccgcaggtgcgacagcacgcggaaggtggcgtcgtggctgaccacgcgctcggcgtagcgcccggcggtgcggaagatcgccgcgccgcgcacgccggcggccggcagcatatagttgaaggtcagcaggcccgccaatccggccagcgaagaggcggccaggaaccagccggagagcgccagcaggccgatgctggccagcagggtgacgatcgccaaaaggatgcccaggctaatcagcaggctatggcggcgatacaacgccaaaaacggcagcaaaacgcgcatgattaaagctccccgcggcgatgggcgatcagcgtggcgaacaggcccggctgggcgctgagggtggcgtaatcgccctgttgcacgatgcgcccgttatccatcacccaaatctgatcgtagtcttcggtatcttccaactggtgcgtcaccagcagggtggtttgctgatgcgaagcggcattcaacgcctgcatcacccgttgttcgctatgggcatcgaggctggcggccggttcatccagcagcagcaggcggcgcgggccgatcagcgcccgggcgaccgccacgcgctgcgcctggcctaccgacaggcgggcggcgttgtcgcccacttcggtgtcgagcccctgtggcagatagggcaacagttcgctgacgtaggcgtgttccaccgcctgctgcagctgcgcttcgtcggcctgtgggcagcccaacaggatattggcgcgcaaggtttgcgccggcaggtgcgggttctgcccgacccagctgagctgttgacgccagttttctgcggacagttcacgcagctcgacgccgttgacggtcaacgacccacggtagggcaggaagccgagcagcagattgagcagcgaacttttaccggcgccgctcagcccgaccagcgccacgcgctgctgcggttgcagggtgaaactcagcggcccggccagcagcacgccgttcggcgacaggatttccaacgcgttcgcctgcaacgtcagcggctgatcggcgggcagctgccgcgtgccgttgcccatctgctcgccttcggcgctgaggaaggtttccagcgcctccgccgcgccgaccgcctgtgctttggcatggtagaaggtgccgagatcgcgcagcggttggaaaaactccggcgccagaatcagcaccagaaaaccggaaaacagcgttacgccgaggccgtagctgccgaaattgagttcgccgaggtaggaaaagccgaagtacaccgccaccacggcgatggaaatcgaggcgaagaactccagtacgccggaagaaaggaaggccatgcgcagcacttccatggtgcggctgcggaagtcttcggaggatttggcgatttgcgcggtttcggcctgcgcgcggtcgaacaaccgcagggtgtccaggccgcgcaggcggtcgaggaagttgccgctcaatcgcgccagtgccacgaagttgcggcggttggcgtcggcggcccccataccgaccagcgccatgaacagcgggatcagcggcgcggtcgccaacagaatcaaaccggcggcccaattgatcgggaaaacggcgatcaggatcagcagcgggatgaagaccgccagatacatctgcggcagatagcgcgagtaatagtcctgcatatcctcgatctgctcgacgatgatgctggcccaactgcccgccggtttgccctggatccaggccgggccgagctgctgcaacttatccagcacctgctggcgcatgcgctgacggatcacctggccacactggaaaccgacccgctcccgcagccagctcaacagcgcccgcaatgcgaacgcgacgatcagccagataaacgaagggatcagctgttcgcgcgggatgtgctcgatgatcagggcgtgcagcaggctggccagcagccacgcctgcgccacgatcagcaggccgctgaacagccccaacagcatggaaaggcgcagccaacgctgcgctaacgaactctgggttttaagccaacgggttaactgttgctgtctggtttttttcatcagatatgcgtctgcgtcgccggcgcccgtttgttacgggctgggttaacgtactgttaaataatagtgtttggcgcaatcggcgacaaacaagcgaggtcccatgttacctcgtcacccggcagactgaaaataataaagcggccaaatgtggctataacagacgcgggaaggagagtgcggaggggggaaacaaaaaaagcggcccgagagccgctttttgctgatgacgagaaagtcttagcagacttctgcgccggcgatgccgtccaggtaacgttctgcgtccagcgccgccatacagccggtgccggcggaagtgatcgcctggcggtagacgtgatccatcacgtcgcctgcggcgaagacgccggggatagtggtttgggtcgcattgccgtgaatgccggactgtaccttgatgtagccgttttccagctccagctggccgccgaagatgccggtgttcgggctgtggccgatagcgatgaacacgccggccagttccagttcacgggtttcgttttccgctttggtgctgcggatgcgcacgccggtcacgcccatttcatcgcccagcacttcgtccagcgtatggtcggtgtgcagcacgatgttgccgcttttcactttttccatcagccggtcgatcaggatcttctccgagcggaagctgtcgcgacggtggatcaggtgaacctcggcggcgatgttggacaggtacagcgcctcttcaacggcggtgttgccgccgccgaccaccgcgactttctggttgcggtagaagaaaccgtcgcaggtcgcgcaggcggaaacgcctttgcccttgaaggcgtcttcggaaggcaggccaaggtagcgggcggaggcgccggtcgcgatgatcagcgcgtcgcagctgtattcgccgctgtcgccgaacaggcggaacggacgctgctgcagatcgacgctgttgatatgatcgaagacgatttcagtctggaacttctccgcgtgctcgcgcatgcgctccatcagcgccgggccggtcaggccttcggcgtcgcccggccagttttccacttcggtggtggtggtcagctggccgccttgctccagaccggtgatcagcaccggattcaggttggcgcgcgccgcgtagacggcggcggtgtaaccggccgggccggagcccagaatcagtaatttgctatgtttagccgtgcccatgaataacctctttattccacaatggcggacaatgaagccgattgtagggaaaatggcgcagtaaaaaaagcgccgggcgacgttgttaacgatttgtatgatagttgtcgcctattaatgcacccgctgtcggcaaatcgtacgccgaacgcagaaatttaccttatcaaagccgcattcggctgctgaatcgccaaccgcgcaaaaacggcgcattctgcgacttcagccgctccccgccggggtttatctgccagcgattcataaccaaaaatgggatgcagacttttcgtgacggtacgttgttctgattttgcttcttttactttgacaatccgctgcgcatttgcgaaaacatcataggaagaagaaattatccccgtaacaccagcaaatcgtacgtatttgcgccgcgaggcggcaatgcgcgatgggtgtgcggagcagagcgcgcaagcgtttgctgattttttctcgacctaaacgtcgttacctgcatcgcgcggagttggacagacaggctgcgcggcgtggaatgatggtagtgaagaagcatatgacaggcatcgggtcttcgcttggaacgaacccttacacattgacgttggctagggtgtggcaagtgcacggaagaaaataagagagacaataataatggcagacaacaagaaacgcccgggtaaagatcttgaccgtatcgaccgcaacatcctgaatgagctgcagaaggatgggcgtatttcgaacgtcgagctttcgaagcgcgtggggttatccccgacaccatgtttggaacgcgtgcgccgtctcgagcgccagggtttcattcatggctataccgcattgcttaacccgcattatctggatgcgtccctgctggttttcgtggagatcacgctgaaccgcggcgcgccggatgtgtttgagcaattcaactcggcagtgcagaagcttgaagagattcaggagtgtcatctggtttccggcgatttcgactacctgttgaaaacccgcgtaccggacatgtcggcttaccgcaaattgctgggcgaaaccttgctgcgtttgccgggggttaacgacacccgtacctacgtagtgatggaagaagtgaaacagagtaaccgtctggttatcaaaacacggtaaggtgcaggtgcaaaacctgattaaattggttacactcctgtttattcatacagtttcggcgccggggcagtttctcggcgctgttgctatgtcagctaacaggaacctggagagcctttcttgagccaggaatatacagaagataaagaagttaccctgaaaagactcagcagtggccggcgtttgctggaagctgtgcttatcgtggtagcgatttttgccgtttacctcatggctgcgttggtcagtttcaatccgtctgacccaagctggtcgcagaccgcgtggcatgagccgattcacaatctgggcggcggtgtcggggcctggttggccgatacgctgttcttcaccttcggggtgctcgcctacgcgataccgccgatcatgctggtcctgtgctgggcggcttatcgccaacgcagcaacagagactacatcgactatttcgcgctttccctgcgcctgatcggcaccctggcgttagtgctcacctcctgcgggctggcggcgctgaacgtcgacgatctctattacttcgcttccggcggcgtgatcggcagcctgctgagcaacgccatgttgccgtggttcaacggcatcggcgctacgctggcgctgctgtgcgtatgggcggcggggttgacgctgtttaccggctggtcctggctggtgatcgccgagaagatcggcggggcggtgctgggcgtcgcgacggtgatgaccaatcgctcacgtcgcgaagagcgctattttgaggatgacgagcgttacgtcgacgacgagcctgagcaggcagggaagggcgccgccgcagcggttgccgcgaccgccgccggagccgcggccgccgatgacgacgtgctgttctccgcgccttcggtcaccgacagcgccaaagcggcggcggaagacgccgccgatccgttgctcagcggcctgcgcgccgacgatggcgagcttgaagcagaagccgcatccatcgcgccggcggcttcgcctgcaccggcggtgaaggcagagatccacgagcccgttgcagcgccgatcgccacacaggcgccgtcggtgacggtggcgccggccgcgccggcctctgtcaatcagcacccggtgagcgccccggcgcaagacgctacgccgccgctgtattccttcgagatcccggaagaaacgcccgcgcctaaggcgacgcgtcctgtcgatccttatcaggatgacgatgagccgcgcctcggcaactggcaagagccggccgcaccgcagccgccggcgcgctctccctttgattttaccgccgcacagcgtgacagcgtcgacatcggcaattcgagcggtttcagcgccaccggcgccaaaccgcagccggatacggcggcagccgctgctgctgcaggtgccgcggcggcgacctttatgccggccttcacggcgaccagcgacggcaatccgcaggttaagcagggcatcggccctgaactgccgcggccgaatccggtgcgcatcccgacccgtcgcgaactggcttcctacggcatcaagctgccttcgcagcgtgcggccgaacaggagcagcgccagacagaggcggtggtgaacccgcaggaagaagaggcgctacaggaagccgcgctgcgtcaggcgtttgccgagcagcaaagccagcgctatggcgaaagctacgcgccggagcaggatgatgaacaggctcagcaggaggccgagctgagcaaggcgtttgccgagcagcagcaccaacgctacggcgaaggctatcaacaggacgacgaagaggcgcagcaagaggccgcgctgcgccaggcgttcgccgagcagcagcaggcgcgctacggccagcaagcacctgctccgcaggcaccggccaccagcccgatcgatacccgcaatgctttcagcttctcgccgatggcggatctggtggacgatggcccgagcgagccaatgttcacgctgtccccgcagcttgaagagcgcattgaacagcaaagcgagcaggaggacgatgtgccgttcggtcagtttgagcctgtggcgcctgcggctcaacctcagcaatcgcatcagccgcctcaacaataccaacagccgcagccgcagcaataccagcagccgcagcaacagcagtatcaacagccgtcgcagccgcaatatcagcagccgcagcaaccggcgcagcagcagcctcagcaagctcaggccgagcaacatccggcgatggacagcctgattcacccgttcctgatgcgcaacgatcagccgctgcagaagccgaccacgccgctgccgacgctggatctgttgaccgaagcgccgaaagaggtggagccggtcgattccttcgcgctggaacagaaggcgcgcctggtggaggccagcctggctgattaccgcgtgaaagccgacgtggtggacatcctgccggggccggtcatcacccgcttcgagctggatctggcgccgggcgttaaagcggcgcgcatttccaacctgtcgcgcgatctggcgcgctcgctgtcgacttcggcggtgcgcgtggtggaagtcatccccggcaagccttatgtcggtctggagctgccgaacgccaaacggcaaacggtgtatctgcgcgaagtgctggattgcccggctttccgtgacaatccgtcgccgctgtccatcgtattgggtaaagacatctccggcgaaccggtagtggccgatctgggcaaaatgccgcacttgctggtcgccggtaccaccggttccggtaagtcggtcggggtcaacgccatgatcctgagcatcttgtataaggccacgccgaaagaagtgcgctttatcatgatcgacccgaaaatgctggagctgtcggtttacgaaggcattccacacctgttgaccgacgtggtcaccgacatgaaagacgccgccaacgcgctgcgctggtgcgtgggtgaaatggaacgccgctacaagctgatgtcagctctgggcgtgcgtaacctggccggctacaacgagcgcgtcgatcaggccgaagcgatggggcgtccgatcccggatccattctggaagccgaccgacagcatggacatcacgccgccggtgctggagaaagagccgtacatcgtggtgatggtcgacgaattcgccgatctgatcatgacggtgggcaagaaggtcgaagagttgatcgctcgcctggcgcagaaagcgcgtgcggcgggtatccacctggtgctggcgacccagcgtccgtcggtggatgtgatcaccggccttatcaaggccaacatcccgacgcgtatcgcctttaccgtgtcgagcaagatcgactctcgcaccatcctcgatcaggggggcgccgagtccttgctgggcatgggtgatatgctttatctggcgccgaactcctcgatcccggtgcgcgtacatggcgcattcgtgcgcgatcaggaagtgcatgcggtggtcaaggattggaaagcgcgcgagcggccccaatataaagagggcattctcagcggcggtgaagacggcgagggcggtgccggcggcggcatggacggcgacgaagagctggatccgctgtttgaccaagcggtggatttcgtggtggataaacgccgcgcctccatctccggcgtacagcgccagttccgtatcggctacaaccgcgcggcgcgcatcatcgaacagatggaggcgcagggcatcgtcagtgagcaggggcataacggcaaccgcgaggtgctggcgccgccgcggcatgactgatggtttagccgttgcaattcaataagaaagggccgcttaagcggcccttgtgcaaagaagcgtaaacccgtttcttctcggaacattggcctaccggccgatcgccggcttcaggtaaagtaacgggagtaaagggttgattgacccgcacggcgtcgccctgcggttaacgcatttcataaggtatctggaataatgaaaaaactgttagttgcctgctgtctgctttcgggattcgcttctacctccgtgctggccgacgccgcacaggatctgcaaagtcgcctggcgaaggtgaacagtttccacgccagcttctcgcaaaccgtgaccagcgccgaaggcgccgcggtgcaacagggtgaaggcgagctgtgggtgaagcggccgaacctgttcaactggcacatgacctcacccgatgagagcgtgctggtctccgatggccaaaccctgtggttttacaacccgttcgtcgagcaggtgacggcgacctggttgaagaacgccaccggcaatacgccgtttatgctgatcacccgcaataatgccagcgactggaaacagtacaacgtgaagcaaaagggcgatgatttcgaattaacgccaaaatccgccagcggcaacctgaagcaattcgccatcagcgtgaccaacagcggcaccatccgcagcttcgccgcagtggagcaggacggccagcgcagcgcttatacgctgaaaagccagcagaacgttgccgccgatccggccaaattcaaatttaccccgccgaagggggtgacgctggacgaccagcgccagtgaggtgcaagtgagtaataatctgtcgctcgatttttcccagaacgagttccagccgttggccgcgcgcatgcggccgaccacgctggcgcagtatatcggccagcagcatctgctggccgccggcaagccactgccgcgcgccatcgaggccgggcagttgcactcgatgattttatgggggccgccgggcaccgggaagacgacgctggcagagctgatcggccgttatggtcaggcggatgtcgaacggatctccgccgtgacctccggcatcaaggagatccgcgaggcgatcgaacgggcgcggcaaaaccgcgacgccggccgccgcactattctgttcgtcgatgaagtgcaccgcttcaacaaaagtcagcaggacgccttcctgccgcacattgaagacggcaccatcacctttatcggcgccactaccgaaaacccgtcgttcgaattgaactcggcgctgctgtcgcgcgcccgcgtgtatctgcttaaggcgctgaccgccgaagatatcggccaggtgctggatcaggccatgaacgacaaggcgcgcggctttggcggccagaacgtcgagctgccggcggaaacgcgccgcctgctgtcggagttggtgggcggcgatgcgcgccgggcgctgaacagcctggaaatgatggcggacatggcggagatcgacgccaaaggcgtgcgggtgctgacgccgcagctgctgaaagaggtgtcgggcgagcgcagcgcgcgcttcgacaacaagggcgaccgttattacgacctgatttccgcgctgcataaatcggtgcgcggttcggcgccggacgccgcgctgtattggtatgcgcgcatcattaccgccggcggcgatccgctctatgtggcgcgccgtctgttggcgatcgcctctgaagacgtgggcaacgccgatccgcgcggcatgcaggtggcgatcgccgcctgggattgcttcacccgcgtggggccggcggagggcgagcgcgccatcgcgcaggcgattgtttacctggcctgcgcgccgaagagcaacgcggtttacaccgcgttcaaggccgccatgcgcgacgccagggagcaggccgattatgacgtgccggagcatttgcgcaacgcgccgaccaagctgatgaaggagatggggctgggggcggagtaccgttacgcccacgacgaacccaacgcctacgccgccggcgagaactacttcccgcccgaaatggcccatacgcgctactaccaaccgacctcgcgcgggctggaagggaaaatcggcgaaaagttggcatggctggctgagcaggatcaaaatagcccgacaaaacgctaccgctagcgtggccgttgcggtaaggttagcgggtatcactcttcttttatgcggctataaatcagccgcatagaacaacaacacttctttcaataacaacaagcacaggattagcatgctcgatcccaatctgctgcgtaatgagctagacgcagtcgccgtcaaactggctcgccgaggctttaaactcgatctggatctgctgcgttcgcaggaagaacgccgcaaagttctgcaggtagaaactgaaacgctgcaagcggaacgcaactcccgatcgaaatccatcggcgcggccaaagcgcgtggggaagacatcgagccgctgcgtcgcgaagtgaacgagctgggtgacaagctggatgccgccaaggcggcgctggatgcgctgcaaagcgagatccgcgattacgccctgacgctgcctaacctgccggacgacgcggtgccggatggtaaagacgacagcgaaaacctggaagtcacccgctggggcgaaccgcgccagtacgacttcgcggtgcgcgatcacgtcgatctgggcgaaatggccggcgggctggattttgccgccgcagttaagctgaccggttcacgcttcgtggtgatgaaagggcaaatcgcccgcatgcaccgcgcgctgtcccagttcatgctggatctgcacaccgagcagcatggctatctggaggcctacgtgccttatctggtcaaccacgccacgctgtacggcaccggccagctgccgaagttcggcgaagatctgttccatacccgcccgctggaagaagaagccgacagcagtaactacgcgctgatcccaacggcggaagtgccgctgaccaacctggtgcgcgacgagatcgtggaagaggaaactctgccgctgaagatgaccgcacacacgccatgcttccgtgcggaagccggttcttacggccgcgacacccgtggtttgatccgcatgcaccagttcgacaaggttgaaatggtgcagatcgtccgcccggaagattcgatggatgccctggaagagctgaccggccacgcggaaaaagtgctgcagttgctgaacttgccttaccgcaaggtgctgctgtgcaccggcgacatgggcttcggcgcgtgcaagacttacgatctggaagtgtggctgccggcgcaggatacctaccgcgagatctcgtcctgctctaacatgtgggacttccaggcgcgtcgcatgcaggcgcgctgccgcagcaaggccgacaagaaaccgcgtctggttcacacgctgaacggctccggcctggcggtcggccgtacactggtggcggtgctggaaaactaccagcaggccgacggtcgcattcaggtgcctgaagtgctgcgtccttatatgggcggcctggaatatatcggctgaacagccaatcactagaaaaaagcgcctgcgggcgctttttttatgtcgagaattcagcctttcgccagcgcgtaggcttgtttaatgtagtccgccaggtgcttgcttttcacttcggcgggcgagtgaagcttgatgtgccgccgatattggccgttgccttcaagttgctgatagcgatcttccagtcggtgcccttggccgaattccaccgtgacgtgattgcggtaggcgaaaacgccgcagaaaaattgagtatgcgagaacatgatgccgccgtatttgaccgattcgctgacgccactgccgctcgccgtggcgatccggcgcacctgttgtacgatctccagcagctcgccgtgcgtgctgccgatgtccgccagcaaggtctcgaccgccgcattatttgcctgactcatctcgcttctccgtcgttaaatccgctctgcgctgagcatagcgctttttcagccgcttagccggaaacaaatcgtgcgctggaatgataagaggcgattgacttttttatcgccagtggcatgatgcgcgcactctcattgcgcgttcggtcacaatttcactatgtccgcttactcccgcccggtgctcttattgctctgcggcctcttgctgctcacggtatccattgccgttttgaatacgttagtgccgctttggttaacccatgctcagctgtcgacctggcaagtgggtatggtcagctcctcctatttcagcggcaacctgttgggcacgttggtcgcgggcaaactgatacagcgcgttggcttcacccgcagctatcatctctcttgtttgctgttcgccgccgcgaccgccggcatggtgctgtcgatcgatttctggagctggctgggctggcgcttcttcgccggcgtcggttgcgcctggatctgggtgattgtggaaagcgcgctgctgcgcagcggcaatctcagcaaccgcggccagctgctggcggcctatatgattgtctattacctcggtacggtgaccggccaattgctgttgagcatgacctcgaccgaattgctgcacgtggtgccgtgggtgaccgcgattgtgatcagcgccatgctgccgatgctgttcgcgcgggtcaaccgccatgaagacgagccgcagcaggcggcggtgtggacaatgttgagacgccgcagcgcgcgcctcggcatcaacggctgcatcatctccggcatcgtgctcggttcgctgtacggcctgatgccgctgtacctctctcatcagggcatgagcgacgccaacgtcggttactggatggcgctgctggtcagctccggcatcgtcggccaatggccggtcggacgcctggccgatcgttacgggcgcctgctggtgctgcgcattcaggtgttcgtggtgatcctcgccagcgtggcgatgctcggcaactacgccatggcgccttcactgttcatcctcggctgcgccggctttaccctgtatccggtagcgatgtcctgggcctgtgagaaggcgctgccgcacgagctggtggcgatgaaccaggcgctgctgatgagctacaccatcggcagcctgctgggcccatcaatgacggcgctgctgatgcagaactattccgaccgcgtgctgttcgtgatgatcgccgccgtggcgctggtttacctgctgatgctgctgaagaagcagaaaccggatcgccaccatacgccgttcgccgccgcctgagcataaaaaaaccggccatgagccggtttttctttggcgctgcgccaatcagtagatcactttgtggccgtagctttccaggatgcctttgacgcgatccatggtctcggccttcggcggatgcacgccgtccagcttgtactcttcccccatcgccacccatttgtgcttgcccagctcgtggtagggcagcagctcgattttctcgatgttggtcatgtctttggtaaactcgcccagcaaatgcgccgatttgtcgtcgtctgaccaacccggcaccaccacgtagcggatccaggtgcgctggttgcgtttcgccaggtagcgggcgaattccagcgtgcgatggttggagacgccgaccagattctgatggatctcatcgttcatctgtttcagatccagcatcaccagatcggtggtgtccagcagctcgtcgatcaccggatcgtagcggcgcacgaagccgttggtatccaggcaggtattgatgccttcggcatggcaggcgcggaaccagtcgcgcacgaattcagcctgcaggatcgcttcgccgccggatgcggtcacgccgccgccggaagcgttcatgaagtggcggtaggccaccgcgtctttcatcagctcttcgacggtcacttctttgccgccgtgggtatcccaggtgtcgcggttatggcaatagaggcagcgcatcaggcagccctggaagaagacgataaagcggatccctggcccgtcgacggtgccgcaggattcgaaggagtggatgcgaccagttactgacattgcggggttttctccaatattgactgtcaaacgcagtctaaaaataggcgcgtggccgccggccaggtatctgcgatgcagtggcggagtgagcccgccaccgggggtaatgatgcctgtcggccggtcagttgccggataactgttttgccggctatccattcagtatagatgtccggcaaaacagactcgtacagagtcaggggagagcggtgggagaaaagggccggcagaaccggccctgacgttgctaccgggcagtttcccgcccggtcggcgttattacatcgtttgagtgaaggtacgagtaatgacgtcctgctgttgctctttggtcagcgagttgaagcgcacggcgtaaccggagacgcggatggtcagctgagggtatttctcagggttttccatcgcgtccagcagcatttcgcggttcattacgttgacgttcagatgctgaccgccctcgatggaggcttcatggtggaagtaaccatccatcaggcccgccaggttggctttacgcacgtcgtcgtctttacccagcgcgttaggcacgatggagaaggtgtaggagatcccgtctttcgcgtaggcaaacggcagtttggctaccgaggtcagggaggcgactgcgcctttctggtcacggccgtgcatcgggttggcacctgggccgaatggtgcgccggcgcggcggccatccggggtgttaccggttttcttaccgtacaccacgttggaggtgatggtcagtacggactgggtcggtaccgcgttgcggtaggtgcgcagtttctgaattttcttcatgaaacgctcaaccaggtcgcaggcgatgtcatcgacgcgggcgtcgttgttaccgaactgcggatactcgccttccactttgaagtcgatagccaggccgtcttcgtcgcgaatggtggtgactttcgcgtacttgatggcggacagggagtcggccgccacggacagaccggcgatgccgcaagccatggtgcgataaacgtcacggtcatgcagcgccatcagcgcagcttcgtagctgtacttgtcgtgcatgtagtgaatgatgttcagcgcggtcacgtactgcttggccagccaatccataaagtggtccatgcgcgccatgactttgtcatagtccaacacttcgtccatcatcggcgcttcttttgggccgacctgcattttcagtttttcgtcaacgccgccgttgatggcgtacagcatggttttcgccaggttggcgcgggcgccgaagaactgcatttgtttgccgacgatcatcgggctgacgcagcaagcgatggcgtagtcatcgttgttgaagtcagggcgcatcaggtcgtcgttttcgtactgtacggaagaggtgtcgatggacactttcgccgcgaatttcttgaagttcagcggcagcttctcagaccacaggatggtcatgttcggttccggagacggccccatggtgtacagggtgttcaggaaacggaagctgtttttggtgaccagggtacggccgtcgacgcccataccggccagggactcagtcgcccagattgggtcgccggagaacagctcatcgtactcaggggtacgcaggaagcgcaccatacgcagtttcatcaccaggtggtcgatcagttcctgcgcttgttcttcggtcagtttgcccgccttgatgtcgcgctcgatgaacacgtcgaggaaggtggacacgcggccgaaggacatggcggcgccgttctgggatttcaccgcggccaggtagccgaagtaggtccactgcaccgcttcttgcgcgctggtggccgggccggagatgtcgtaaccgtatttggcggccatctctttgatctgagccagagcgcgatgctgttcagcgatctcttcgcgcagctggatggtcatttccaggtcttcgccgttttccagtttttcctgcagcgatttgaactggttcagcttgtcggccatcaggaagtcgataccgtacagcgcaacgcggcggtagtcgccgatgatgcggccgcggccgtaggcgtccggcagaccggtcagcacgccggatttacggcagttcaggatgtctttggtgtaaacgtcgaatacgccctggttgtgggttttgcggtattcggtgaacacttttttcagctgcggatccagttcgcggccgtacactttgcacgaaccttcgaccattttgatgccgccgaacgggatcagcgcgcgtttcagaggggcgtcggtctgcagacccacgatggtttccagctctttggcgatgtaacccgcgtcgtgagaaacgatggttgaagcaacgttggtgtcgaaatcaaccggcgcatgagtgcggttttccagtttgatcccttccataaccttgtcccacaaggtggtggtggcttgagtagcgccagccaggaaggattcgtcaccctcataaggcgtgtagtttttctggatgaagtcacgaacgttgacttcattctgccagtcacccttgctgaaaccttcccaagcgttggctaatttctcgttaagttcggtcattgtacacctacctttgattgtggatttctaactctgcgcgcggttactcacagcttagtgctgctcgcggcccccgcgcagataaattacccagtaagtcaacccaaccagcagaccaccgccgatgatgttaccgagggtgaccggaatcaggttgtcgatgatgaagttgcttactgtcagatgagcgaattgctcaggtaccgctcctacggcttgccagaattccggcgtggcgaagtgtttgaccacgatgcccatagggatcataaacatgttagcgatgctgtgttcgaagccgctggcgacaaacatcccgaccggcagcaccatggcgagcatcttgtcggtcagggtgcggccggagtagctcatccagaccgccaggcagaccatcaggttggccagaatgccgaggcagacggcttcgatgaaggtgtgatgcagcttgtggtctgcggtttgcaggacattcaggccccactggccgttggcgaccatatactcgccggagaaccagatcagcgccacgaagaacagcgcgccgaccaggttgccgagataaacgttcagccagttggcgcccagctggccccagctgatgcggccgctggccttggcgatgacgataagcacggtagaggtgaacaggtcggcgcccgacaccaccaccagcattaacccgagagagaagcagatgccgccgaccagtttcgccagcccgaaaggcacgccggcggtgccggtggtcgccgtgatgtagaagacgaaggcgatggaaatgaagacaccggcggtgatcgccaaataaaacgttttcagcggatgtttggtggctttatacacgccggcatcttcagcgattttcgccgttgccgcaggtaaaatcagatcgaaggggctgtcagttttcaaactaactctcgctcttaagggttaaaacaacgcaatgagatactagcaaagcagtataggggaaaatttgatttggatcataaggcggggaagtagagcggtgaaatggcttgttttttgtgtggtttttatggttaatttattgatttttaataaaaaacaattttttaatgtttgcaaatttttttgaatccaccgagtggtcggcgtggagtaaagttaaatttttaggcgttttgtcgccgcgcggcgttgaaagtttaattatcggttaattattatttcaccgtccggcaacaattgacggtttatttatttttatggtcgtttaaccacctatttcccggcgaaaaaataaaaccgaatgcgttgaaataaaccgcaaaattgaaaacgccgcaacggagtgcggcgtttggcaacaggggtactcccaaagtggcagtatcccctgatgatgcttaggccttggcccagtggcggcgtttggccgcctgcagcttctcgtaagccgccagcagagcctgatgggccggcagcgccttcagatcggcatcgacggcgaacagcccgttgaagcgctcttcaccgctgatggcggcggaggcggcgtcgaccgcttcctggccgtacatcttcacgaacgcggtatagtactgcgccgcttcgcgttcaggctcctgcgccagcagcagcagcgtttgcaggcagcggtagtagttgctgcgcgccgggctcagcaccgaggcgttgaagtcctgcgtccattcggtccagatcagcgcctgatccagatcgccgcccgccagcgccagcatcgatttcagctcgcccacgcgcagggtataccaggcgttgtctttgccgctggcaatgcccagcagttcgcgtacgcgggtgaaatcgtccagcccttcgtcgtccaactgctcgatcagcgccaggtattcttccggctcccactcgctgcccggcagcgccagcagcgtatcgcgcaggtgcgcgcccatgctgttgttagccagcagcaggtcttccgccgggtagatatcggacatgcccggcacgatgatgcggcaagcgtagacgcccaggtgctcgtagtcggcgatgtacacttccgcgtcttccttgtcgaagatgctcatcagggtggcgaactcttcctgcgtgctgccgctgaagttccagtcaacgaacgggtaatcggcatcctgtttgaacagatcccaggagatcagaccgctggagtcgatgaagtgcgtttccaggttggtgtgttccgccacttcttcgtcatcgaaggtcggcgcggtgaacacgtcgagatctttcaggctgcggccctgcagcagttcggttaccgtgcgctccagcgccacgccgaagtccgggtgcgcgccgaatgaagcgaagcaggtgccgttggtcgggttgaacagcaccacgcagatcaccgggtagttgccgcccagcgaggcgtcataggagaggattgggaaaccttcctcttccagcttggcgatggcttccaccacgcccgggtagcggttcagcacctcgtccgggatcgccggcaggctgatggattcggcgataatgcggtttttcacatagcgctcgaacacttccgacaggccctgcacgcgcgcttcgttggcggtgttgccggcggacatgccgttggaaacatacaggttgccgatgatgttcatcggaatgtataccgtttgctgatctgactgacgggtgaacggcagcgcgcagatgccgcgatcggcattgccggactgcagatcgaccagatcgctggcgctcagctcttgctgcggatcgtagaaggcgtgcagacgttcgtcgaggatgccggccggcagcgcgtcgtcttcagggatcgggaaccatttctcattcgggtagtgcacgaagtcgccttcggcgatctgcttgcccagatagaaatcggcgaagaagtagttggtggacaggcgctcgaaatattcacccagcgcggaggccagcgcggcttttttgctggcgcctttgccgttggtgaagcacagcgggcaatcgcgatcgcggatgtgcaccgaccacacgtgcggcaccgggttcagccaggaggcttcttcgatgttgaaaccgagatcgctcagtttctgctggaaacgggagatggagtcttccagggcggcgtctttaccggggataaaagtttgcgtcattgtcttcactttttgcgcgtactaaaaacgcgcaatgatacggggttttacgctggagctccacgtattcctaaagcggcggcaaagtcacagtttttttaaggataaaggccataattcagcaagttatctgtcacggagaaatctaatgaaatcagtgaaactcagcgcgttaaccctcttgttgaccggtgtcagcgcctcggcgctggcgctgcccaacatcaccctgctggcgaccggcggcactatcgccggcggcggcgattcggcgacgaaatccaactataccgcgggcaaactgggcgtcgaggcgttggtcgatgcggtgccggcgctgaaagatatcgccaacgtgcagggggaacaggtggtgaacatcggctcgcaggacatgaacgatcaggtctggctgacgctggcgaagaaaattgacgccgactgcagcaaaaccgacggcttcgtcatcactcacggcaccgatacgctggaagagacggcctatttccttgatttgacggtgaaatgcgacaagccggtggtgttggtgggggctatgcggccggcgacggcgatgagcgccgacggcccgttcaacctgtataacgcggtggtgacggcggcggatccgcaatcggccaaccgcggggtgctggtggcgatgaacgacaccgtgctggacgcgcgtgacgtcactaagaccaataccaccgccgtgcagaccttccagtcgccaaactacggcccgctggggtatatccacaacggcaagatcgattaccagcgctcgccgcagcgtaagcatacccgggagacgccgttcgacgtcagcaagctgaacgagctgccgaaggtcggcatcgtctacaactacgccaacgcctccgatgcgccagccaaggccctgatcgccgaaggctatcagggcatcgtcagcgccggggtcggcaacggcaacctgtataaaaccgtgttcgacaccctagcgacggcggcgcacaacggcgtggcggtggtgcgttcttcgcgcgtgccgaccggcgccaccaccgaggatgcggaagtggacgacgccaagtacggcttcgtggccgccggcacgctgaatccgcaaaaggcgcgcattctgctgcagctggcgctgacgcaaaccaaagacgcgaagcagatccagcagatgtttaatcagtactgatcgtttcttctcctgcgggggccatccgggctcccgcagccatgttggctgaatacagcataaaacaccgcgttaacccgctgaatttccccatgtcacagggttttatcgtccaaacaatcgcgacggccgcagagcctgtcatcacccggcacggccgtttgccgccgacgggcgaataagcgttgcagccatggggcgtgagtgataaaaccgatgggttggttaacgcgagcgttaacttcgggcgtcttttcgacaggtcgcttttctgcggcgaacagtgaatgtggtgaggggaaatgactcaggtttataattttagctctggcccggcgatgctgccggtggaagtgttgcgtcgtgcggaacaggaactgtgcaactggcacggcctgggaacgtctgtgatggagatcagtcaccgcagcaaagaattcatcgccgttgccgagcaggcggaacaggatctgcgcgatctgctgaaagtcccctccaactataaagtgctgttttgccacggcggcgcccgcgcgcagttcgccgcgctgccgctgaacctgctgggcgacaaggccaccgccgactatatcgacggcggttattgggcgcacagcgccatcaaggaagcggaaaagtattgcgccccgaacgtcatcgacgtgaaaacccgcatcgacggcctgagcggcatcacgccgatgaaagagtggcaactgagcaacgacgcggcttacgtgcattattgcccgaatgagaccatcgacggcgtggccatcgatgaaacgccggacttcggcgacaaagtggtgatcggcgattactcctcgaccatcctgtcccgcccgctcgacgtcagccgtttcggcgtgatttacgccggcgcgcagaaaaatatcggccctgccggcctgacgctggtgatcgtgcgcgacgatctgctgggcaaggcgcgcaaagaagtgccgtctatccttgactacaccgtgctggccgagaacggctcgatgttcaacaccccgccgaccttcgcctggtacttgtccgggctggtgttcaaatggctgaaagagcagggcggcctggtggagatgcaaaaacgcaatcaggccaaggccgagctgctgtacgcgaccatcgataaatctgacttctaccgcagccaggtggcgatcgccaaccgttcctggatgaacgtgccgttccagctggccgatgcggcgctggacaaggtgttcctcagcgaagccgaggctatcggcctgcaggcgctgaaaggccaccgggtagttggcggcatgcgcgcttctatttacaatgccatgccgctggccggcgtccaggcgctgaccgacttcatggccgacttcgaacgtcgtcacggttgattccggcagcccgccaggcgcgggcggcctcaggctgttgtccttttgcattaaagcggctccggcattattccggagccgtttcgtttatcagaattggagagttttgttcacatggtggattccctgacgttacaaccggtcgccctggtcaatggcaccgtcaacttacccggctcgaagagcgtttctaaccgcgctctgctgctggcggcgctggcggagggaacgacccggctgaccaacctgctggacagcgacgacgtgcgtcatatgctgaatgcgctgcaggcgttgggtgtgaactaccggctttccgccgaccgcaccgagtgtgaagtgaccggcgtggccgggccgttggtggccaaccaaccgctggaactgttcctcggcaatgccggcaccgcgatgcgcccactggcggcggcgctgtgccttggtgaaggcgacgtggtgctgaccggggaacctcgcatgaaagaacgcccgatcggccatctggtggacgcgttgcgccagggcggggcgcagattgattacctcgaacagaccgattacccgccaattcgcctgcgcggcggtttccagggcggcgacgtcaccgttgacggcagcgtttccagccagttcctgaccgcgttgctgatgaccgcgcccctggcgccgcaggatacgcagatccacatcaagggcgagctggtttccaagccgtacatcgacatcacgctgcatctgatgcgcaccttcggcgtatcggtgagccacgacaactaccgggtattccatatccaggggcgccagacgtatatcgcgccgggcgattacctggttgagggcgacgcttcttccgcctcttacttcctggcggcggcggcgatcaagggcggcaccgtgcgcgtgaccggcatcggtcgcaaaagcgtgcagggcgacaccaagtttgccgacgtgctggagaaaatgggcgcgcgcatcacctggggcgacgatttcatcgagtgcagccgcggtgaactgcgcggcatcgacatggacatgaaccacattcccgacgcggcgatgaccatcgccaccgcagcgctgttcgccgaggggccgaccaccatccgcaatatctacaactggcgggtgaaggagaccgaccgtctggcggcgatggccaccgagctgcgtaaagtgggggcggaagtggacgaaggcgaagactacattcacgtcgtgccgccggccaagctgcagttcgccgagatcggcacctacaacgatcaccgcatggcaatgtgcttctcgctggtggcgctgtcggatacgccggtcaccattctcgatccgaaatgcaccgcgaagaccttcccggattatttcgaacagctggcgcgcatcagccagccggcgtaacccgtcaaatcgtttattttaaggcccctttgcgggcctttatcgtttttaacctttggcgaccggcgtttcttctatactttttcgcggttgtgcgcttattttcaacaaccggatagttccagggtaacagatcgccgtagggcagcgtataatacgccaccgtatttgcccctgattgggcaggtgacagagctcacgggcttcgagtcgaagcacgccgtgtctctgtgaggttttctacctgaaggagagagaaatgacggctacagccccggtgataaccgttgatggaccaagtggcgcgggcaaaggcacgctgtgtaaagcgttggccgagtcccttggttggcgtttgctggactccggcgcgatctatcgcgtgctggcgctggcggcgttgcatcatcaggtggatatcacttctgaggaagcgctggttccgctggccgcacatctcgatgttcgcttcgttgcccaggacggcaagctgcaggtgattttggaaggtgaggacgtcagcaatgagatccgcaccgaaaccgtcggcaacaccgcgtcgcaagcggctgcgtttccgcgcgtgcgcgaggcgttgctgcgccgccagcgcgcattccgtgaggcgcccggcctgattgccgatggccgcgacatgggcacggtggtgttccctgacgcgccggtcaagattttcctcgacgccagctcggaggagcgcgcgcaccgccgcatgctgcagttgcaggagaaaggctttaatgttaactttgaacgtcttttagccgagataaaggaacgggacgaccgtgaccgtaatcggcctatcgcgcctctggtgcccgcttctgacgccctcgtgctggattctaccagcatgtcgatcgaagaagtgatccggcaggcgttgacgtatgcacagaaagtgttggcgttgccgcagcaataagcgcggcggcgctattggctttttgtcatatttgtcatagcggtatcgcaatatatcgggtaaaattttacccctgtaaccttaaaccctgtcggcatggagccaatggcggggtatgtgaaacaaccccattcggcgggacgctaaatggacgttaaactaaagaaccctgaagattaacaacatgactgaatctttcgctcaactctttgaagaatccttaaaagaaatcgaaacccgcccgggttccatcgttcgtggcgtcgttgttgctatcgacaaagatatcgtactggttgacgccggtctgaaatctgagtctgccatcccggctgagcaattcaaaaacgcccagggcgagctggaaatccaggttggtgacgaagttgacgttgctctggatgctgttgaagacggcttcggtgaaaccctgctgtcccgtgagaaagctaagcgtcacgaagcttggatcacgctggaaaaagcctacgaagaagctgagactgtaaccggtgttatcaacggcaaagtgaagggtggcttcaccgtcgagctgaacggcatccgcgcgttcctgccaggttccctggttgacgtgcgtccggtacgtgacactctgcacctggaaggcaaagagcttgagttcaaagtcatcaagctggatcagaagcgcaacaacgttgtcgtttctcgccgtgcggttatcgaatccgagaacagcgctgagcgcgatcaactgctggaaaacctgcaggaaggcatggaagttaaaggtatcgttaagaacctcactgactacggtgcattcgttgatctgggcggcgtagacggcctgctgcacatcactgacatggcttggaaacgcgttaagcacccaagcgaaatcgtcaatgttggcgatgaaatcactgttaaagtgctgaagttcgaccgcgagcgtactcgtgtatccctgggcctgaaacagctgggcgaagatccatgggttgctatcgcgaaacgttacccagaaggcaccaagctgactggccgtgtaaccaacctgactgattacggctgcttcgtagaaatcgaagaaggcgttgaaggtctggtacacgtttctgaaatggattggaccaacaaaaacatccatccgtccaaagttgttaacgtgggcgacgtagtggaagtgatggttctggacatcgatgaagaacgtcgtcgtatctccctgggcctgaagcagtgcaaatccaacccatggcagcagttcgcagaaacccacaacaagggcgaccgcgttgaaggtaaaatcaagtctatcactgacttcggtatcttcatcggcctggacggcggcatcgacggcctggttcacctgtctgacatctcctggaacgttgcaggcgaagaagcagtacgtgaatacaagaaaggcgacgaaatcgctgctgttgttctgcaagttgacgcagagcgcgagcgtatctccctgggcgtgaagcaactggctgaagacccgttcaataactacctgtctatgaacaagaaaggtgctattgttactggtaaagtcactgcagttgacgccaaaggtgctacagttgaattggcaggcggcgtagaaggttacctgcgtgcatctgaagcctctcgcgaccgcattgaagatgcaactctggttctgaacgtaggtgacgaagttgaagctaaattcaccggcgttgaccgtaagaaccgcgttgtaagcctgtccgtacgtgctaaggacgaagctgacgagaaagacgccatcgcaactgttaacaacaaacaggaagaaggcaacttctctaacgcaatggctgaagctttcaaagcggctaaaggcgagtaatgacggggggcggtcgctgaccgccccaatacggtagtttagctgcaaagcttggaggtactatgaccaagtctgaacttattgaaagacttgctggccagcaatctcatattccggcgaaggccgttgaggatgcagtgaaagagatgcttgagcacatggccgctacgctggccgagggcgaacgcattgagatccgcggattcggcagtttttctcttcactaccgtgccccgcgtgtaggccgcaacccgaaaaccggtgacaaagtcgagctggacggcaagtacgttcctcacttcaaaccaggcaaagagttgcgtgaccgcgccaatatctatggctagtcgctgactgatcatagcgttgttgcttgtaaagaatataaaacggtgcctgtaaggcgccgttttttttcgcctgcgattctccacgatacgcttgtgaattgcgtactgcgccgcatttgcggtgtagttgctgcataaacctctcttaccctggcgcgctcgccgcattctcgctaaagcccgctggtcgcgacatgccgcttgactcatcctgtttgcctgccgtaacgcgcttgtgcgcgtggcgggtgcgatgggagaagaacgatcaaaatttcgctggatctggcgatattcgccgttatctgcggcatcttgccgctgctgattttaccgcagttgccagaactatggctgctgtggccgatgctgtttgtcggctgcttgctgttgcgcgcgcgttggccgttctgccgctatttggcctgcctgggattgggattcacatgggcggttttcaacgccggaagcctgctcgggcaaatggagcgcttaactcgcatgccggacgtgacggcggtggtgcaggtgagcagcgtcgcgctggagcccgccgccagtaaacagacgctgatgcgcatcgagcgggtcgacggtcattggttggcgcctgcgctggcgtttaccacgacgtgggctcccgaacggcagcggctgtgtgccgggcagcgttggcaattgaaactgcgcctgcggccggtacatggcaagctcaatgaaggcggatttgacagccaacgttgggcgattgcccagcgccagccgttgacggggcgggtcaggcaggctcgtttgctggatggcgactgcgggctgcgtcagcgcatcatcagccatgcggaaactaacatcggtgaattgcgttacaaggcggtattgctggcgctggcgtttggggaacgaaccgcgctggagcaggctttgcgcacgctgatgctgaaaaccggcatcgctcacctgatggccatttcagggttgcatgtggcgatggtcgccattttgttctgggccgcgttgcgagcgctgcagttttttcttcccgcccatttgattggctatcgctttccattggtcgcaggctgggtggcgacgctgatctatgtttggttggtgggcgcccaaccgccggcggtgcgtaccgcgttggcgatgacgctgtggatgctgttgcgcttgcgcggcgttcattgttcttcctggcaagtgtggctgtggtgtatcgggctgattttgctgtgcgatccgttggcggttttgtcagacagtttttggctgtcggtgctggcggtggggtgtttgattttttggtttgaatgggcaccgctcagcgagcgatttcgctcggcctggtattgggcgccggtacgctggctgcatattcagttgggcatgacgttgttgctggtgccgatgcaggtcgcgctgtttttaggcctgacgctgacctcgctgcctgccaatctttgggctgtgcccatcgtctcattggtgacggtgccgttgattttgctggcggtgatcggcggcgtcttcccctcgctaagttacgggctttggtggttggcagatttcacgttgagcggggtgtttgtgccgctgcattacctgcaacgcggttgggtggatttgggggccgcctcgctgctggccagcatagcgggatggcttatcgttatctgctggcgctttcattggtggtggcgctatgcgccggggctggcggcggtggcgatatgctgcgtgttgtggcgtggcaaagcgccggactatcgctggcgtgtcgatatgcttgatgtcgggcacgggttggcggtggttatcgagcaaaacggcaaggggatactgtacgataccggcgatcgttggcccacgggcagcgctgccgaacggcatatcttaccgatgttgaactggcggaatattgaactggagcagatcattatcagccatattcacctcgatcatatcggcgggctgccggtgatgcggcgggcgtttccgcaggcgacggtgcgcagcccgatacgcggggaaggacacttgccctgcatcgccggggagcgttggcgctggcaatcgctgcaattcgaggtgctgtggccaccgaaaacgcgcaaaaggccggtcaatgacgactcctgcgtgatccgcatcgacgatgggcaattcagtttgctgctcaccggcgatgcggaaaagcaggcggaggcgcagctgttacggttgcggcgcgatcgcttggcggctacggtgttgcaggtggggcatcacggcagcaagacgtcctcgacgccgccgtttctgcgcgcggtcaatcccgaagtggcgctggcctccgcatcgcgttacaacaaatggcgattgccggcgcggaaagtggtcgccagataccgggcaaatggcatccaatggcgcgatacaacgcgctcgggtcagttatcggtactttttttcgacaacgattggcaaattaaaggctttcgcgaacaattaatgccccgttggtaccatcagcggtttggcgtagagggtgataatgagtaaaataggccgctatttcttccgatgctggtatttgcatgatgaatgataaagatctctcgacctggcagacgttccgtcgactctggccgatgatcactccttttaagaccgggctgattgtggccgccattgcgttgattatgaacgcagcgggggacacgctgatgctgtctctgcttaaaccgctattggacgatgggtttggaaaaaccgacagcagcgtgctggtatggatgccgttggcggtgattgcgctgatgttgatgcgcggcgtgaccagttttgtttcaagctactgcatttcctgggtttccggcatggtggtgatgcaaatgcgccgccgcctgtttggccacatgatgagaatgccggtggccttcttcgatcagcagtccaccgggactttgctgtcgcgtattacctatgattccgagcaggtagcttcctcctcttccagcgcgctggtgaccgtggtgcgtgaaggagcctcgatcattggcctgttcatcatgatgttttactacagctggcagctgtcggtgatcctgatcgtgctggcgccgatcgtctccatcgccattcgcctggtgtccaagcgtttccgcaacatcagcaagaacatgcagaacaccatggggcaggtgaccaccagcgccgagcagatgctgaaaggccataaagaagtgttgatcttcggcggccagcaggtggaaaccgagcgttttaactcggtgagcaaccgcatgcgccaacagggcatgaaactggtctccgcgtcttcgatttccgatccgatcattcagctgatcgcttcgctggccctggcgttcgtgctgtttgccgccagcttcccaagcgtgatggaaaccctgaccgccggcaccattaccgtggtgttctcgtcgatgatcgcgctgatgcgtccgctgaagtcgctgaccaacgtcaatgcccagttccagcgagggatggcggcctgtcagacgctgttctccattttggatatggaacaggaaaaagacaccggcacccgcgaagtgaagcgtgcgaaaggcgatatcgaattccgcaacgtcaccttctactacccggccaaagaaacgccggcgctgcgtgatatcaacctgaaaatctccgaaggcaaaaccgtcgcgttggtgggccgttccggttcgggtaaatccaccatcgccaacctgctgacgcgcttctacgatattcaggaaggcgaaatcctgatggatggccacgatctgcgtgaatataccctggcctcgctgcgcaatcaggtggccctggtttcacaaaacgtgcacctgttcaacgacaccatcgccaacaacatcgcctatgcgcgcgagagcgaatacagccgcgagcagattgagaaagcggcggaaatggcgtacgcgatggacttcatcaacaagatggaaaacggtctggatacggtgatcggtgaaaacggcgtgatgctgtccggcggccaacgccagcgcattgccatcgcgcgtgctttgctgcgcgattgcccgatcctgatcctggatgaggcgacgtctgcgctggataccgaatccgagcgtgccattcaggccgcgctggacgagctgcagaaagaccgcacttcgctggtgatcgcgcaccgtctgtcgaccattgagaaggcggacgagatcctggtggtggaggacggccgcatcgtcgaacgcggtgaacacgccgagttgcttgagcgccagggcgcctatgcgcagctgcaccgcatgcagtttggtcaataatgattgagcgcatctggtccggcggttcgttgctttatctggcgctattgccgctctcgtggctttatggcttgttcagttggctgatccgtctcagttaccgctgcggcctgcgtaaaagttggcgttcgccggtgccggtagtggtggtgggtaacctcaccgccggcggcaacggtaaaacgccgatggtgatttggctggtggaacacctgcaacaacggggctatcgcgttggcgtggtgtcacgcggctacggcggcaagtcggcggtttatccgctggtgctcggtcagaatacgtcgacccgcgaggcgggcgatgagccggtgctgatttatcaacgtaccggtgcgcctgtggcgatcgcgcccaagcgagccgaggcggtgcaggccctgctgcaacaacagccgctggatgtgatcatcaccgacgacggcttgcagcactacgctttacagcgtgacttcgagctggtggtcatcgacggcgtgcgtcgtttcggtaacggctggtggttgccggccgggccgatgcgtgaacgtgccgcgcggcttggcagcgtcgatgcgcgcgtcgccaatggcggcgtggcgcaggccggggaaattgccatgcgtctgcaggcgcgtgatgcggtgaacttgctgagcggtgagcgtcgcccggcggccgagctgccgcgcgtggtggcgatggcgggtatcggccatccgccgcgtttcttcgcgacgttggaaaagttgaacgtcgaagtcgtgcaggaagtggcgtttgccgatcatcaggaatatcagcaggaaccgctggcggcgttggttaatgcagatcaaacgctgttgatgacggagaaggacgcggtgaagtgtcgcgcctttgcccagcccaattggtggtatctaccggttgatgcggtgctaccgtccgctcaggctgagcaactgctgcaggatatcgagtccctgctgactaagtaatctcaggatgccagcgtggcaagccccagggcttgcgcgcaggcttccagcgaacgctgctgggtttgctgatacagcgccagctcgtcgatcacctcactgcccaacgcttgttcaaacgctgcccggctggaaaccgcgttgtactgcgcgtggcggctgtcccccagattcgactggaaaatccccgccgcgctgaccggcagaaaatcttcatacaccagaggctggaagcgaacgtgttctttctcgatcagctgttccagggtgctgtgcttgtccagcgactctttggccgccaggccgcattcggtcgggaaatagcggaaccaggctagctgttgctcacgcagcgtggcgtaatcatccggaaacgcccggaagttttcctccagcagttgatagtagcgctcggcattcttctcgctcggcggcgcctgcaacgcatcgttggtcgcctgcagcaaacggtcgtaaagttcgcgtcctttaggcgttagcgccacgccgcgttgttcgatctcgccgaagcgcgcggtatggtgaccggcgatggcgtggccgtcgtgctcaacgaaatcgacgctttcttccaacgctttgaagctggtttggcgcagcaggatcgcgcggcggcggcgcggcgggccctcgatgaccgctttgggcgtaataccgcggccgggcatcgcttgctgaacgcgatcgatatccagcgtacgtggtgtcaggtggttgatatgcggccctttaaacgccaccacgtcggcgatcaggcgatgctgatcgtgcaactgccggtattcttcggcgctgaccgtcgcctggttatgccagcggaaggtttccagcgcttgttcgacaaattcttgcgcctgcacttcattcagcccgccttgcgcttcctgcagcgccatcagctccagcgcgcgatcggtaaagatacggcggcgcgccagcaagcgctcggccagcgcacgcagcgcgggatcttctatcagttccaggcgcagcagggaggtgaacacgcggaaaggactgatctgcagcgcgtcttcgtgtatggcgcgaaaagcggtggagtgcaccggaacgcccgccaccgacaggtcatagtaaccgaccggcgccatgcccatcacccggaacaggcggcgcagggtggccagttcgtccgccgtgccgacccggatcgcgccgtggcgctccatggccaggcgttcgatctcgccggtgatttgcagttgatgagccagtgcggcatcttcgcgtagaacctgccggttggtttccgccaccagctccagcagatcgccgtacagcggtacctctttttgatacatgtccgacatcgcgtgagagaatctggcgcggatttcattaggtgaaacgaactgctgggcggtcatgcgcatagctccttgattcagcataatctgaaaaatcgtgtttttagcggcaaaagtgctggcgaaaaagccgtctgccttgttttcccctcaagtttagccatctgatttgggatttgttatagcggcgtcaagcatattagagttttatgcgttagctctcatttgcagcgctcagacgggcaaatgatgccccggtgaggagaggaacgcgctggatcggctgcggcgagcgttaaattaagtcatgtatattcatggggataaaaataaattcggtgtaatgatgaatttattgcaataaacctcttgtgcattcaccatttttatgagtaaatgcaagtcggcctgtaatccagacctatttatgttcgagtttagagttaagcagttcctccaaaaacgttatcatccgattccgcttcaaagacgaaccttctaagtacctcccataagtaatgtttctgaaatggccgcaattgcctcttatggcaggttttgtaaatatatttaaaggtaaaagtaatgtctaagaagactggtcaagttaagtggttcaacgaaagcaaaggttttggtttcattgagcagcacgacggcggcaaagatgtattcgtacacttctccgcaatcatgaccgacggtttcaagaccctggctgaaggccagcgcgtcgagtacaccatccaggacagcccacgcgggccggctgccgccaacgtagttgctctgtaagaagacagggaacgcgtataaagagatcttaatacaaccatggtgacgcttcagcgctgagtcatgcggaagatattaagttcaacaagcccgccttagtgcgggttttttatttttttgctcacgagaggtttgttacgaaaaactttaggatgggctggtagcgtccagacaatataaaaaatgacgttgtcaaggatgctcaagtaaaaggatataagttatgtttaaaaatactgtgttaaaaatgggtcgtgtgaaatggtttaatcaggccgaaggctatggttttatttcaccggtagatggcagcgacgaaatctatgtcaaccgcaacgctatcgccaacaccaaaaataagtcgttgaacgaaggtcagaacgttgagttctcgatctatcgcagctcgcatgggctgtccgcggcagacgttatcgcgttctgatcgcatcctccttcctcgccagtgccggtgtcgccacccgcaagcactggcgaagataaatcccgcgatatccactattatcaggccattgcctactcgccacggatatcaggatgaccaccccgaccatttcccttaccgccgctcgcgcactgcaccttgccgcccaggggctgctttctccgcttaaacgccaggctcggcccgatgatgtcgtgagcgcgatccagcgcatggggctgttacaaatcgataccattagcgtcgtcgcccgcagcccgtatctggtgctgttcagccgtttgggggcctatcagccggagtggctggagcaggcgctcgccggccgcaagttgttcgagtattgggcgcacgaggcctgtttcctgccgatcgaggattttggtctgttgcggcatcgcatgctggcgccgcatgatatgggctggaaatactcggccgactgggtgcagcagcaccaggcggcgatggacaacctgctgcggcatatcgaacaacaggggccggtgcgttccgccgatttcagcgccgagaagaaaggcaacagcgggtggtgggactggaaaccggagaaacggcacctggagatcctgtttaccgccggcaagctgatggtggccgagcgtcgcaacttccaccgggtttacgatctgaccgaaaggctgctgccggcctgggacgatgcgcgtcatgcgctgcctgcggagcgggcgcgccggcagatgttgcatcgcacctgccgctatctgggcattttccgcgccgagtggttggcggattattatcggctgaaacgcgtggcgccaaaagccttgctggcagagctgcaggcgcagggggaaatttcgccggtgcaggtagaggggctggaagggcagttctatgtgcatgaatcactggcggaactgctgccgctggcggagcagggcaaactgaaatcgacggtcaccagcctgctgtcgccttttgatccggtggtgtgggatcgccgccgggcgctcgaactgttcaactttgactatcggctggagtgttacacgccgaaagaaaaacgtcgctatggttacttcacgttgccggtgctgcatcggggcgagctggtggggcggattgacgccaaggcgcaccgtcgccagggcatcttcgagatcatcagtttccatgcggagccgcaggtgcgcttcggtaaacagcgagcgcaggacatccggcaggccatcgcgcgcacggccaaatggcacggtgcgcaacgcgtcgcgctgggcgacattccggccgcgttggccgcggaatggggtgccggctgggaagtgggataacgagcgacgccgtcggtggggtaaaacgaagtgaagcgtcgctcgttacaaaggggctcagtggctgaagttagcgaacagagcgatgattttatgcagacgtttgatcatgtatcacggcttttttgtgatttgtgtcacaaaattctacgccgggatgcgccgcagttcaagctgtcgcgctgacgcagtgaggaaatatcggcaccttggcgccgccgatgattaacctgaggccgggcgttatgctatcctcactgcctttcccagatgacctatcccctagcggaggatgcatggaccaccgtttactcgaaatcgttgcctgcccggtatgcaacggcaaactctatttcaataaagaaaaccaggaactggtgtgcaaagcggatgggttggcttacccgctgcgtgatggcattccggtgctgttggaaaatgaagcgcgtgcgctgtcgctggatgagaagcacgcatgagttttatcgctattattcccgcccgctatgcctcaacccgtttgccgggcaaaccgctggccgatattcacggcaagccgatggtggtgcatgtgatggagcgcgcccgtgagtccggcgctagccgcgtcatcgtggcgaccgatcatcctgaagtcgccaaagcggtggaagccgccggcggcgaagtgtgcatgaccagcccggatcaccattccggcaccgagcgtctggcggaagtgatcgcgcactacggctttgccgacgaccagatcatcgttaacgtgcagggcgatgagccgctgatcccacccgttatcgtgcggcaggtggcggaaaacctggcgggcagccaggccggcatggcgacgttggcggtgccgatcgagagcgccgaagaggctttcaaccccaatgcggtgaaggtggtgatggacgcgcagggctacgcgctctatttctcacgcgccaccattccgtgggatcgcgagcgtttcgccgcgtcgaaagagagcatcggcgacagcctgctgcgtcatatcggcatctacgcataccgcgcgggcttcgtgcgccgctacgtcagctgggcgccgagccaactggagcagatcgagctgttggaacagctgcgcgtgctgtggtacggtgaaaagatccacgtggcggtcgcgaaagcgatcccgagcgtgggggtcgatacgccggaagacctccagcgcgtgcgcgacagcattcaaccctgagcctgatttcgtcggcgcgccgcgcaacgcgccgacgatgcaatacccccattattgatccccgttttgttgatctgcgttgaagaatttttccgctcgccgttcgatgatgttacgcatcccccctaattagcctgaggtgaatgccttatggagcagttacgcgccgaactgagcattgtgctgggtgagtccatcagccggctggagcgggtgagcgaacagccttatgcgcatatgtattcgctgtacgatcggcagggcaacgcgatcccgctgatggcgaaaagctttatctgtcggggcatcgcccagcaggaggcgtacaagctgtcgatgctggcgcgcgacggggatattcgcctgcctacggtgtatggcgtggtgtgtacccaccaggcgccgtatacggaaatcctgctgatcgagcgcctgcgcggcgtgtcggctgaggcgccgacgcgctcgccggatcgctggaatatgctgatggagcagatcgttgacgggatattggcctggcaccgcatcgacagccacggcagcgtcggcagcgttgacagcacgcaggagaatgactggttttgctggtatcaacagcgggtcgaagtgctgtgggcgacggtggtcaatctcaccaccccgcagttgaccatggcggatcggcgtttgctgtaccgcacgcgcgaagcgctgacccatttcttcgtcggcttcgatgatccctgtgttctggtgcacggtaacttatcgctgcgcagcatgctgaaagatcccaaaagcgatcaactgctggcgatgctcaatcccggcgtagtgctgtgggcgccgcgcgaatacgatcttttccgcctctgcgaggcgggcatgcccagccagctgctgttcagctatctgcagcgggcgccggtcgccgacgctttcctggcgcggcgctggctatatgtggtgtgggaagcggtagggcgtttgatccataccggcaagctggagcggcggccgttcgactatgcgtcgcaacagctgctgccctggctggccggttgaacgagctttactctgcgccggcgctatctgcgcccttcagccattgccacagactacccagcgtttcataccacgcgcgctcggtatggccgaggaacattgacgacggtgtggcgcgatcccagatattcagcggcgagtcgatcgctaactggttggccggcgccgggatcgggtgcagccccttagccttgaagaaacgcatggcgcgcggcagatggttggcggaggtcaccagaatgaacggttgctcgccgaccaatttggcgacctgagcggcctcttgctcggtatcgcgcggttcccccaagatcaccatatcactgcgcggcacgcccaggctttcggccaccagcgccgcagtggcggcgttgctttgcatggggccggcggacgcgccggtgaacaccatcctggcgccgggatgtgcaaggtagagccgcacgccttccgtcacgcgcggcagactgttgccgagcaggtttgaactgggcgcccaatcgggattgtaggtataacccccgcccaacacgacgatgtagctgaccggatcgttaccgcgataagtctggtattcggcctcgatcggccgcagcagccggtcggccaccggttgcaggctgaaaagcagtaaaaacagccagctcagcgtgaaaatcgtcttaccgcttttttgccagcgggtgaaccacagcagcagcagcgccagccccatcagcagcatcaacagcggcagtggcatcagcagggcgccaaagaactttttcaggttgaacagcatcgaaaatcagatccttttgggtgaaaaagcggcatccaggtataaacaggccgcaagaagatacattctaagtcagtctgtgccaaaatagcaggtttgaatgggcgtgcgctttgccgccgacaagaatgagatcagcggagccgttgtccatgcaggatcgcaattttgacgatattgctgaaaaatttgcgcgtaatatttacggcaccacgaaaggaaaaatccgccaggcggtggtttggcaggatctgaccgggctgctggcgcagttgccgcagcggccgctgcgcattctcgacgccgggggcggtgaaggccatatggcctgccaactggcagaattaggacatcaggtgttgttgtgcgatctttctggtgagatgatccagcgcgccgcgcagctggcggagcagaaaggtgtgagccagaacatgcaattcgtacaaagttctgcgcaggatatcgctcaacatttggaacagccggttgatctgatattgtttcatgcagtgcttgaatggatcgccgagcccgaagcggcgctgcaggcgttgtatgactgcctgacgccgggcggcgcactgtcgctgatgttcttcaacgccaacggcctcttgatgcgcaacgtggtgttgggtaatttccaactggtggatcccgaggtcagacggcgccgcaagcgttcgctgtcgccgcaatatccgcacgatccgctattggtctacggttggttggaacagctgggcatgcgcatcggcggcaaaaccggcgtgcgggtgttccacgactatctgcagagcagacagctgcaaacacaaaaatttgaagagttactggcgcttgaacagcactattgccggcaggagccgtacgtgagtttggggcgctatattcacgtcatggcgcataaaccaaacctgaaggacgaactatgagtgaattttcccagacagtacccgaactggtcgcctgggcacggaaaaatgatttctctatttcgctccctacggagcgtctcgcatttctgctcgccatcgccaccctgaacggcgaacgactggacggcgagatgagcgaaggtgagctggttgatgcatttcgccatgtcagcaagggttttgaacagacgcatgaaacggtggcgatgcgcgccaacaatgcgattaacgacatggtgcgccagcgcctgttgaaccgctttaccagcgagctggcggacggcaacgcgatttaccgcctgacgccgttgggtatcggcattaccgattactatattcgccaacgcgaattctccacgctgcgcctgtcgatgcagctgtcgatcgtggcgcaggaactgaagcgcgccgccgacgccgccgacgaaggcggcgacgatttccattggcaccgcaacgtgttcgcgccgttgaaatattcggtggcggaaatcttcgacagcatcgacatgacccaacgcgtgatggacgagcagcagcagagcgtgaagaacgacatcgcggcgctgctgagcaaagattggcgggcggcgatctccagctgcgagatgctgctgtcggaaacctcgggcaccctgcgcgagctgcaggatacgctggatgcggcgggcgataagctgcaggccaacttgctgcgcatccaggacgcaaccctcggcaacgtggagctgggtttcgttgacaagctggtgttcgatctgcaaagcaagctggatcgcatcatcagctggggtcagcaggcgatcgacctgtggatcggctacgatcgccacgtgcataaatttatccgtaccgctatcgatatggacaaaaaccgcgtgttcgcccagcgcctgcgccagtcggtgcaaacctatttcgaccacccgtgggcgctgacccatgccaatgccgatcgtctgctggacatgcgcgacgaagaactggcgctgcgcagcgatgaagtgaccggggaactgccgccggatctggagttcgaagagttcagcgagattcgcgaacagctggcggcgatgatcgaagaggcgctgaaggtgtaccaggaacagcagatgccgctcaaccttgcagcggtgatgcgcgattatctggcgcaatatccgcgtgcgcgtcatttcgacgtggcacgtttagtggtcgaccaggctgtgcgcctcggtgtggctgaagcagatttctcagggttgccggcggaatggcaggcaatcaatgattacggagccaaggtccaggcccatgtcatcgacaaatattgaacaagtaatgccagtcaagctggccaaggcgctgtccaactcgctgtttccggcattggatagccaactgcgcgcgggtcgtcacatcggtatcgatgagctggacaaccacgcctttttaatggatttccaggatgagctggaagagttttacaaccgttacagcgtcgagctgattcgggcgccggaaggtttcttctatttgcgcccgcgctccaccacgctgatcccgcgttcggtgctgtccgagctggatatgatggtgggtaagatcttgtgctacctgtatctcagccccgagcgcctggcgcacgagggcattttcagccatcaggagctgtacgacgagctgctgagcctggccgatgagaacaagctgctgaagttcgtcaaccagcgctctaccggttcggatctcgatcggcagaagctgcacgaaaaggtgcgcacctcgctgaaccgtctgcgccgcctcggcatggtctatttcatgggcaatgacagcagcaagttccgcattaccgaggcggtgttccgcttcggcgccgacgtgcgcagcggcgacgatccgcgtgaagcgcagctgcgcatgattcgcgacggcgaggcgatgccggttgaaaccagcctgtcgctgaacgatgagaatgacgctgaggatcagcaggttgataacgctcctgacggtgcagaggatgaacaggaatgattgaacgcggtaaatttcgctcgttgacgctggttaactggaacggcttcttcgcccgcacctttgatctggatgagctggtgaccacgctgtccggcggtaacggggcggggaaatccaccaccatggcggccttcgtcaccgcactgatccccgacctgacgctgctgcacttccgtaacaccaccgaagcgggcgccaccagcggctcgcgcgacaagggcctgcacggcaagctgcgcgccggcgtgtgttactccactcttgacgtcgtcaattcacgccaccagcgcgtggtggttggcgtgcgtctgcagcaggtggcagggcgcgaccgcaaggtcgatatcaaaccgttcaccattcaggggctgccgaccgcggtacagccgactgaattgctgacccagaccgtgggtgagcgccaggcgcgcgtgctgtcgctgcaagagttgaaagagcgcgtggaagagatggagggcgtgcagttcaagcagttcaactccatcaccgattaccactcgctgatgttcgatctgggcgtgatcccgaaacgcctgcgttcgtccgccgatcgcagcaagttctaccgtctgatcgaagcgtcgctgtacggcggtatctccagcgccatcacccgctcgctgcgtgattacctgctgccggaaaacagcggcgtgcgcaaggcgttccaggacatggaagcggcgctgcgcgaaaaccgcatgacgctggaggcaatccgcgtcacccagtcggatcgcgacctgttcaagcatctgatctccgaggccacttcctatgtggcggcggactatatgcgccacgccaacgaacgccgcatccatctggacggcgcgctggcgctgcgcagcgatctgttgggcagccgcaagcagctggccgccgaacagtatcgccatgtggaaatggcgcgtgagctgagcgagcagagcggcgccgaatccgatctggaaaccgattaccaggccgccagcgaccacctgaatctggtgcagacggccatgcgtcagcaggagaagatcgaacgctatgaagccgatctggaagagctgacctaccgtctggaagagcagaacgaagtggtggccgaggcgagcgagcagcaggccgaaaacgaagcgcgcgccgaagcggccgagctggaagtggatgagctgaagagccagctggccgactaccagcaggcgctcgatgtgcagcagacccgcgccattcagtaccagcaggcgctgcaggcgttggagcgcgcacgcgcgctgtgccaactgccggacctgaccgccgataatgccgaacagtggctggataccttccaggcccgcgagcaggaggcgaccgaagcgctgctgatgctggaacagaagctgagcgtggccgacgccgcgcacggccagttcgagcaggcctatcagctggtgggtaaaatcgccggccaggtcagccgcagcgaagcctggcagtgcgcgcgcgaattgctgcgcgactggccttcgcagcagcacttagccgagcgcgttcagccgctgcgcctgcgcctgagcgaactggaacagcgcctgcgctcgcagcaggatgccgagcgcctgctgcaagaattttgcaaacgccatggccaagagtaccagccggacgatctcgacatgctgcagcaggagctggaagagcgcctggaagcgctgtcgcagaacgtcagcgaagccggcgaacgccgcatggagatgcgccaggagctggagcagatccagcagcgcatccgtgagctgacggcgcgcgccccggtgtggctggcagcgcaggacgccctgagccagctcagcgatcagagcggagagccgctggaaaacagccagcaggtgactgaatacatgcagcagctgctggagcgtgagcgcgaaaccactgtcgagcgcgacgaagtggcggcgcgcaagcgcgaagtggaagcgcagatcgaacgtctcagccagccgggcggcgcggaagatcaacgcctggtcaccttggccgaacgtttcggcggcgtactgctgtcggaaatttacgatgacgttaccatcgacgacgcgccttacttctcggcgctgtacggcccttcgcgccacgccatcgtggtgccggatctgtcgctggtgcgcgagatgctggaagggctggaagattgcccggaagatctctacctgatcgaaggggatccgcagtcgttcgatgacagcgtatttgccgtcgaagaacaggacaaagcggtggtggtgaagatcgccgatcgccagtggcgttattcccgctacccggaagtgccgctgttcggccgcgcggcgcgcgaaaaccgcctggaagtgctgcatgccgagcgtgaaacgctggcggagcgctatgccacgctgtcgttcgacgtgcagaaaacccagcgttcgcatcaggccttcagccgctttatcggcacccatctggcggtggcgttcgacgccgatccggaagcggagatccgcggcctgaacgcccgtcgcggcgagatcgagcgtgcgctgaacaatcacgaagcgcagaatcagcagcagcgccagcagtacgatcaggccaaagagggcatttccgcgctcaaccgcctgatgccgctggtgtcgttgctgaacgatgaaacgctgcaggatcgcgtcgacgagatccgcgaagagctggaagaagcacaggacgccgcgcgccacattcaacagcacggggtgtcgctgaccaaactggagccgctgctgtcggtgctgcagagcgatccgcagcagcatgaacagctgcagcaggactacgcgcaggcgcaaagcgtgcagcgtcaggccaaacagcaggcgttcgcgttgacagaagtggtgcagcgccgcgcgcacttcagctataccgactccgccggcatgcagaatgccaacaacgatctcaacgacaagctgcgccagcgtctggaacaggcggaagccgaacgcgcccgcgcccgtgagcagctgcgtcaatatcaaacccagttcacccaatacagccaggtgctggcctcgctgaaaagctcgtatgacgccaagcgcgacatgctgaaagagctgagccaggagctggtggatatcggcgtgcaggccgacgccaacgccgaagcgcgcgcgcgtcagcgccgcgacgagctgcatgcggcgctgagcaacaaccgcgctcgccgcaatcagctggagaaacagctgaccttctgcgaagccgaaatggatggcctgcagaagaaactgcgcaagctggaacgcgactaccatcagctgcgcgagcaggtggtgaccgccaaggcgggctggtgcgcggtgatgcgtctggtgaaagacaacggcgtggaacgccgtctgcatcgccgcgagctggcgtatatggatggcgacgagctgcgctcgatgtcggataaggcgctcggcgcgctgcgtctggcggtggcggacaacgaacacctgcgcgacgtgctgcgtctgtcggaagacccgaagcggccggagcgtaagattcagttctatatcgcggtgtaccaacacctgcgcgagcgtatccgccaggacatcatccgtaccgacgatccggtcgaggccatcgagcagatggagattgagctgggccgtctgaccgaagaactgaccgcgcgcgagcagaagctggcgatcagttcgaaaagcgtggccaacatcattcgcaaaaccattcagcgcgagcagaaccgcattcgcatgctgaaccaggggttgcaggccgttgctttcggccaggtgaagagcgtccgtctgaacgtcaatgtgcgcgaagcgcatgccactctgctggacgtgctctccgagcagcaggaacagcatcaggatctgttcaacagcaaccgcctgaccttctccgaagcgctggccaagctgtatcagcgcctgaatccgcagatcgacatggggcagcgtacgccacagaccattggcgaggagttgctggactaccgcaactacctggaaatggaagttgaggtgtaccgtggttccgacggctggctgcgtgcggaaagcggcgcgttgtctaccggtgaagccatcggtaccgggatgtcaatcctggtgatggtggtgcagagctgggaagaagagtcccgccgcctgcgcggtaaagatatctcgccgtgtcgcctgctgttcctcgatgaagcggcgcgtctggatgccaagtcgatcgccacgctgttcgaactgtgcgatcgtctggagatgcagctgatcatcgcggcgccggaaaacatcagtccggagaagggcaccacctataaactggtgcgtaaggtgttccagaaccacgagcatgtgcacgtggtggggctgcgcggtttcgccggcgagccgccggcgctgggcactgcgccggttgagacgccgtaacgcagaaaaacgccctaaaaatccgaaaatagccgccgcagggtggctatttttttgtgcgcgtggatgatagtcctgcttttttatccgttgaaaagcggttagtttaatcacataaacagttattcgacgcccgcagggcgaaacggcctttctgtttgtatactgaaactatatgcagtttttgacgtttttttttgtgagcatacagggggcaagggatgttgcttaaaaagggaaactctctacgacgtttggcgctgagtggcgctatcgcctgtagtcttgtgtcgtcgttttccgccttggccaccgtaacggcgttaccggtggcaacagcaggcatgtccgttgcgcagagtcgttctgaactgctggccgcgttgccgcgcggtatggatctgcactacctttccacgctggcgccgctgtatgcggcgaatcatatgcagccgatgtggcaggatcgcgaggccgttcagcaatttcaacagcagctggccgaactggcgatgtccggcgtacagccgcagttcacccagtgggtgaagatgttgaccgatccggcgctcagtgaagcgggccgcgatgcggtgttgtccgatgcgatgctgggctatttgcagtttgtatccgccatcggcgccaacggcaacaactggctgtacagcaatattccttacaagcttggtttgccgcccacggcggtgatcaatcaatggcagctggcggtgcgccaggcgcgaaccctgagctacgtgaattcgcttgcgccgcagcatccgcaatacgccaagatgcatcaggcgctgcgtgacatgctggcggacaaccgcccctggccgcaggtgggcaggggcccgagcttgcgcccaggccaaatgagcaacgatatcccggcgctgcgtgagatcctgacgcgcaccggcatgctggccgcctcggcgccggaagcggagccggaaccggcggtggtctcggcgaagagcaatgaacccgacgacggcgggctgacggtagacgaagagaaaagccgcgtgacggtcagcccatcggcggcgccggtgacggagttgaccgcggaacagacgccgccgcagatcggcagcgtggtgagcgacaacctctataccaacgagctggtggagggcgtcaagcgtttccagaaatggcaggggttgacggcggacggcgtgatcggcgtgcgcacccgcgagtggctcaacgtgtcaccgaaaacccgcgccgcgctgttggcgctgaatatccagcgcttgcgcatcttgccggggcatgtcggcaccggcattatggtgaacattcccaactactcgctgacctactatcagaacggcaacgaagtgttgtcctcccgcgttatcgtcgggcggccaagccgcaagacgccgttgatgagcagcgcattgaataacgtggtggtcaacccgccttggaacgtgccgaccacgctggtgcgtgaggatatcgtgccgaaggcgatgcgcgacggtaactatttccagaaacacggctataccgtgctgtcaggctggagcaacgatgcggaagtgatcaacccggcgatgatcgactggagcatggtttctgcgcgcaacttcccgtatcgcgtgcgccaggcgccgggcgccaccaactcgctggggcgtttcaagttcaatatgccgagctcggatgccatctacctgcacgataccccgaaccacagcctgttccagaaagacatccgcgcgctcagctccggctgcgtgcgggtgaacaaggcttccgatttggcgaatatgctgctgcaggatgccggctggaacaatagccgcgtttcctccacgctgaaagaaggcaataccacttatgtgaatattcgccagcgtattcccgtaaaactgtattatctgaccgcctgggtttcggatgatggccaaccgcaattccgtacagatatttacaattatgataatacggtgagatcgggcgcacaaattttggctcaggccaaaaaattaatgcagtaaatgcagtaattataaataaataacggtcagaatgtttggctataccgcaggccctcgtagccgggggcctgtaaacctaggcgtatcgcgggttgactcagcatacgcaggcggttatggttcggacagtgcgctgctttgtgcatttattttgacattcttgccgggtttaacagagtcatggacaaaattgatcatcatcgccgtaaatggctggcgctaggtggcgccgctatgggcatagcactgcttccagggcaggcatttgccagtctttccaccgctcgaccgcgtattttagtgctgaataacctgaataccggtgaatctattaaagccgagttctttgacggcaaaggctacaataaagaagagttggttcggctaaatcatctgttccgcgattatcgcgccaacaaggttaaatcgatcgatcccagcttgtttgatcacctctatcgcctgcaggggctgctgggtaccagcaagccggtgcagctgatctccggttatcgttccgtagataccaataacgaattgcgcgcgcacagccgcggtgtggccaagcacagctaccataccaagggccaggcgatggatttccatattgaaggtatccaattgagtaatatccgtaaagcggcgttaaaaatgcgcgccggtggtgtaggatattacccacgtagcaacttcgtgcacatcgataccggcccggttcggagctggtaatcgcggtgcctcagtgaataacgccgctccttgcggaggcggtgttattgtcgttggagccttatgaaataccatcttattcccgttaccgcctttagccagaattgcagcctgatctggtgtgaaaacacgcagcaggcggcgttggtcgatcccggcggcgaagcggaaaaaatcaaagcggaagtggcgaaacagggtgtgacaatcacgcagattttgctgacgcacggccatttggatcacgtcggcgcggcggcggagctggcggaacattatcaggtgccgatttacggcccggataaagaggacgctttttggctggatggtttgccggcgcagagccggatgttcgggctggaagagtgtgcgccgctgaccccgacccgctggctgtcggaaggcgatgagatgcaggtgggtgagatgacgctcaaggtgttgcattgccctgggcacacaccgggccacatcgtctttatcaatgagcaggcgcgtttggcgctggtgggtgacgtgctgtttaacggcggcgtggggcgcagcgacttcccgcgcggtgatcatcaggcgctgatcgcctctattcgcaccaagctgctgccattgggcgacgatatgcgctttattcccggccacggcccgatgtcgacctttggccacgagcgccagaccaatccgttcctgcgcgaagagccggcggtgtggtaacgattatttcccggccgaaataatcaagggcgcatagagcgccctttttttatgatttatgacctgcgtcgatgctttagagcacggcgacgatggcttcacacagcggtgccatgttgtccggcgtcatgccggccacgttcacccggcccgagtttacggcgtatacgccgaactcttcacgcagacgcagcacctgttctttggtcaggccgctgaatgagaacatgccgttctgctggatgataaagctgaagtcctgttgtgcgcctttctcctgcagggtgttcacgaacagctgacgcatgcggtgaatgcgctggcgcatgtcggtcagctcctgctcccacatcgcgcgcagcgcgtcattgcccagaatggtggcgacaacggccgcgccgtgtgacggcgggttggagtagttggcgcggatagccgctttcacctggctgaaggcgcgatcggcagtctcggcatcggcagctacaagggtgcaagcgccgacgcgctcattgtacaggccgaagtttttcgagtaggagctggcgacgatcagctcttgatgtttggcggcgaaaatacgcagaccctgcgcatcctcttccagaccgttggcgaagccctggtaggcgaagtcgaacagcggcagccagccattggcggcggaaagctcagccagctgcgcccactgttccgccgttggatcgataccggtcgggttatggcagcagccgtggaacagcacgacatcaccggcctgagcctgtttcaggctgttcagcaggccgtcaaaatccagcgcgtggttggctgcgtcgtagtaggcgtactccagcacttccaggccaacggcgctaaagacgttcttgtggttcggccagcttgggttgctgatccagatgcgcttggcgctggtctggttggcgataaagtctgccgccacgcgcaggccgccggtgccgcctggcgtctgtgcggtgcgtgcgcgacgatcggtgacgatcgggctctctttaccgaacagcagctcttgcgtgcagctggcaaacgccgggatgccttcaatgccgagatagtttttggtggtctcgttttccagcagatactgttcagctttttttacgctggtcagcaccggggttttgccggtttcatctttataaacgccaatgcctaaattgattttattcgggcgggcgtcggcgcggaaaatgtcggtcaggcccaggatcgggtcggcgggtgcggcggtgattttttcaaacatgtcaggtgcttccaaatctcggagttaagcagacagaagcatcagggtagcgccagttatcggctttgccaaccgtttgcgataaaaacaccgcgatcttgtgaacgggaaggattcgacagaaaaaatgagggataaggggaaatctgcaggataaaacgttaccggcagacacaaataaaaacagggccgaagccctgtttttttaacttagccgacggtgaaccgccgttaagcgagacaacttagaactggtataccagaccaacagctacgatatcgtcggtagcggtgccggttgctttggtgaactcgttgtcatccagcaggttgattttgtaatcaacgtaggtggacatgttcttgttgaagtaataggtggtaccaacagaaacatatttaaccagatcctggtcagaacccacgcctgggacgttcaggtttttacctttagattgcaggtaagacacttctggacgcagaccgaagtcgaactggtactgagcagtcacttcgaagttctgagttttgctcgcgaagccgccgcacttgtcatcggtagctgcacagcctgcaccgaagttaccgccgccgaacggagtcatgttacgggtttctgcgtacatcgccgccaggtaaacgttgttggcgtcgtatttcgcgcccacggtccatgcgtcagccttgtcgccacgctcgttggaacgcagtttttggtcgtcggtacggttagaagatgcgtatgcagcgccgaagcttacgccttcgccgatgtcataagtagaggagatgccccagccgtcgccgttttgtttcttgacgttacggccgtcgttctggtttttgccctggtactgaacggcgaagttcagaccgtcaaccagaccgaagaagttgttgttacgataggtcgcaacgccgttggtacggccggtcatgaagttgtcggtgtaggtgtaagtatcgccaccgaactctggcagcatatcggtccagccttccacgtcgtacagtacgccgtagttacggccgtagtcgaaggagccgtagtcagcgaatttcagacccgcgaagcccagacgggttttggtgccttcggtgccctgagattcggagtggttagcctggacgttgtattcccactggccgtaaccggtcagttggtcagtaatctgagtttcacctttgaagccgaaacgaacataggtctgatcgccgtcattacctttgtcgtcggagaagtagtgcagaccgtcaactttgccgtacagatccagcttgttgccgtctttgttgtagatttcagctgcgtttgctgcaccagcagccaacagagccgggataaccactgcaagaatgttgcgcttcatcattattaccctcattggtgttattcggacacctttgccactgccgccaataattccttgggaactattgttgatagattggtgtcgtcctgtgtctgaacgcagtgttccattcacaggcgggttaatctaggacgaaaatgataccaatgtcgcaatgaggttgcaaaaggaaagtatgtgtaaccaaatgtaatttttcgggaactttgtgacgtgcgtcaatattaaaaaatgcgaaaggccagcgaggctggcctttgttttgtaacgaaatcgtttaaaaaacgtgtgatcgtataaattagaagcttgcgttacgtggggtgcgtgggaacgggatcacatcgcgcacgttttgcacgccggtgacataggcgattaaacgttcaaagcccaggccgaaaccggaatgcggcacggtgccgtaacgacgcagatcgcgataccaccagtagtcttccttattcaggcccatctcttccagacgctgatcgagtacgtcgagacgttcttcacgctgagagcccccgatgatttcaccgatgcccggcgccagcacgtccatggccgcgacggttttgccgtcttcgttcatgcgcatatagaacgctttgatgtctttcgggtagtttttcaccactaccggcgcctggaagtgtttctccgccagataacgctcatgttcggaagagagatcgataccccaggagaccgggttttcgaaggtttggccagaggccagcaggatctcaatggcgtcggtgtagtctacctgggcgaaatcggaagagacgaagcgctccagacgcgcgatagcgtctttatccacgcgctcggcgaagaatttcagatcgtctgcacgctcatccagcaccgcctggaacacatacttcagcatgctttcggccaggccggcgacatcgtccagcgtcgcgaaggccacttccggctcgatcatccagaattcagccagatggcggctggtgttggagttttcagcgcggaaagttgggccgaaggtgtataccttggacagcgcacaggcgtaggtttcgccgttcagctggccggaaacggtgaggaaggcttccttaccgaagaagtcctggctgaaatcgacggcgcccttgtcggtgcgcggcaggttttccagatccagcgtggagacgcggaacatctcgccggcgccttcggtgtcggaggcggtgatcagcggggtagatacccagaaatagccattttcatggaagaagcggtggatcgcctgcgccagggtatgacgcacgcgcgccacggcgccgatcaggttggtgcgcgggcgcaggtgggccacttcgcgcaggtattcgatgctgtgacgtttggccgccatcgggtaagtatccggatcgtcgacccagccgaccactttgatcgcggtggcctgcagctcgaagctctggccttcgcccggtgaggcgacgaccttgccggtaacttcaaccgaacagccggtggtcaggtgcagcacttcatcttgataattcggcagagaattattaacgacggcctgtaacggatcaaagcaggaaccgtcatagacggccaggaaggagataccagcttttgaatctctccgggtacgtacccagccgcgtacggtgacttcactgtcaaccgcagcacgaccttgcagtacgtcgactacaggcactacgctcatagatttctctctttaataatttggtttagaaatagcttacaacccaagaatatgggggtaatggctatgttacttgccgcggtgcagagcacaagcagaaatcatcggattggcgcaacatttatcgcggctgactgaaaagagggcgttcgggataaaaacaaaaaagccggcgcgtgaaccgggccggctttctctctttatataaagaaggctcagctggctttcttcaccagcggcagatcgaaggccttgcgcagggccctgacgaacgcctggtcctggcagatggtcttgccggggctgtcggagagtttggccaccggcttgcctttgcactcgaccagcttgatcacgatatttaacggcttaacgccgggaatatcgcaggtcaggcgcgtgccgatgccgaagccgagattaatgcgctgatagaaatggcgatagagcgccagcgctttttccagatccagattgtccgagaacaccagcgttttgctcagtgggtcgatgcccagtttctgatagtgggcaatggccttttcaccccactcgacgggatcgcccgaatcgtggcgaagcccctgataacgctcggcgaactgcgggccgaagtcgcgcaggaaggcatccatggtgatgcagtcggtgagcgcgatgccaagctggtccggatattcatccagccaggcctgcaatgcggcgcgctggctgttggccagcaccgggcttatctgctgatgcgcctggaaccactcatgcgcctgcgtgccgaccggcgccagacccagctggtgcgccagatcgtaattgctggtgcccgacaggtacgggaattcggcctgcaaggtgctgacgatggcctgttgcacgccctgagagaaacggcggcgggtgccgaaatccatcaacttgaagcgcgaaagatccagatcgcccgccaacgtcttgaactgcgccagcttggtttgcagatgcgccaccgcctgttccggcgtcgccagcggcgagcgccggcggtgcaccacttcgctgatcactgccagcaatgggacttcccacatgatcacttcacgccaggggccggcgatgcggatttgcagcttgccgtcgcggttgtcgatggtgacctgctgcggatcgtagcggaacgttcgcagccagttcaggtaatcttgacggaagaagggcaggcccgaaagataagcgaattcggcgtcggttagcgccagccggctcatcagcgccacctgcgcgcggatctcgtcggcatattcgcccagcagttcgtcgccgcggcagcggaattccgccgccacgctgatcgcgggatagcgatggaacactgcttgctgcatatgaagcttataagcatcggtatcaagcagtgatgtcaaaatcggggaagcgtattgagtcatagcgcgttacagcatcctcgtcaggcgcgtgtccaaatccggataatcataaaagtgggggtggagtatacccggattatcctgttattgaagctgcatcacaccataaatcaccgaagcgggtcgaggattaaacgtgcctttatggcagccggatagcggcggagaggaaaaaaagccagatatgcctgtaaggtgaatgacttagcctaattagtcataaaaattataatgttaattattttaaacagcgaatcagataaagccggcctgggtatgcacgctgacccgatccttgccgttctttttgcaaaagtagagcgcttcgtccgcctgtttgatcgccgcctgcagcgcggtgaacgcgctgactggcgcaatgccgcagctggtggtgaaacgcacttgccgtccgtcggccagatttagcgtcaggcgatgagtacgggcgcgcaattgctccatgatgtcccgcgcgttgtccaacgaacagttgcccagcagcaccgcgaactcttcgccgccatagcggcagaagatgtcgctggcgcggaacgcgcgttgcagcaggtggccgaaggccaccagcgcccggtcacccacgtcgtggccgtagctgtcgttgagttgtttgaaattgtcgatgtcgatcaggcaaaaggcctgcgggtagctggcgttgcccagcagttgacattcaaggaagaatttacggcggttgtagatattggtgagcggatcgaggaaggaagaggcctcgagctctttaatcagcagttgtttctcgctctccagcgagaccttgtccagttggtattgcctgagctgctgaatggcgtcgctgatggcgatcaattcctggctgtagaaggcgtcgttgcgatcgatattcatctcaccgcgcgacagccgcacgatattgttgtgggtcttggtcagccagcggttgatgctggtgcagaacaccagcgccggcaaaatgaacagcaaaaccaccaggccggccagcgcgatcatgccgtaaatggtcgtctggctatcgtaaattttatgacgcgaagcgacggtttccagctcgaagctgcgttgatacagcgcctgcgaaagcccgctcagctcgtcgacatagcgcgaaataagcgctgcgggatagggtttttgggtattgatggcggtgtataacccatcggtgatctgcttgagacgttcggccgacactagggtgagcaactgattgacgagctcggtggtttgcacgtcgtcgtagttgatcttcatgaagatcaatcgggtgctcagcgcgttcagcacgccggttagctgaatggacttcagataggcgtctttgcgaacgagctggctgacgttgacgtcgataatctgatcgcttaattccgtcaatgacatatttagccggttattgaggcggatggcctcgagaaacataaaggagtcggtatccaccatccgggtatcgtaggtgtagcggtaataactcttgctggtttgcgagatgtaataggcgctgttgatgttgaacagattggcgttggtgttattgacctgcgaaagctgcaggttgtcattatccagcagctgttccatcaaagcgatcatcgacagcgcggcgattttttgctgaaccccaagctgtctggcgacctcatcgtccagatgttcgcggatccgggtgattctctcgcgcgctacccgatcggcggccaaacattgcgcacgggtgatttgcggatcgatcaggctcaatcgtttgaggcgatgagccagcaacgcagcctgaaaagcttcggaaatttctttggcgcgatcaattttgtacaggtttagctggttgtcgcggtagtcggtatgggcttcgagcagctcatcgacgatgaacagagagaaagaagtcatcaggcacagggtgaaaaaatagattgcgtatttaatcttcataatgcgagccatccctgaacctgatgccgcaattataccaccatgccgccggtgtcgcctcaactatgccggcgcgccgcgatggcggttttttagcagtaaatgctgatttttatttggccattggtcacccgcactgccgcctgccgggcgatttatgatttgcctctgatttctctctcctggtcgccctgcggctctgggcttttcggccagctgtgatacagtttattcacaattcaggctcaccgcgcgccgcaggggaacataccggctgcggtacgaaggagaagagcagcctggcacctataactcactgagacgtttaagggtttttatgacacaacagccacaggcaaaataccgccacgattatcgcgcgcccgattacaccacgaccgatatcgatttggacttcagtctggacgcggaaaccacgcgcgtgaccgccgtcagtaaaatcaaacgtcagggggcggccggtgcaccgctggtgctggatggcgaagatttgacgctggtgagcattcaggtggacggccaaccgtggagcgcctaccgtcagcaggataaccagctgatcatcgaagagttgccggcacaattcactcttaccattgtcaacgatattcacccggcgaagaacaccgcgctggaagggctgtacctgtccggcgatgcgctgtgcacgcaatgcgaagccgaaggcttccaccacattacttattaccaggatcgcccggacgtgctggcgcgctttaccacccgcatcgtggccgacaagacgcgctatccgttcctgctgtcgaacggcaaccgcatcggccagggcgaattggccgatggccgccactgggtgcaatggcaggatccgttcccgaaaccttgctacctgttcgcgctggtggcgggggatttcgacgtgctgcgcgacagcttcaccacccgttccggccgtaaggtcgcactggagctgttcgtcgatcgcggcaacctggatcgcgccgactgggcaatgacttcgttgaagaactcgatgaagtgggacgagacccgcttcggcctggaatatgatctcgacatttatatgattgtggcggtcgatttcttcaatatgggcgcgatggagaacaaagggttaaatatctttaactccaaatatgtgctagcgaaggcggaaaccgcgaccgacaaggattacctgaacatcgaagcggtgatcggccacgaatacttccacaactggaccggtaaccgcgtgacctgccgcgactggttccagctcagtctgaaagaggggctgacggtgttccgcgatcaggaattcagttccgatctgggatcgcgttcggtcaaccgcatcgacaatgtgcgcgtgatgcgcggcgcgcagtttgccgaagacgccagcccgatggcgcacgccatccgcccggacaaagtcatcgagatgaacaacttctacaccctcacggtgtatgaaaagggttccgaggtgatccgtatgatgcataccctgttgggggaggagaacttccagaaagggatgcagctctatttcgaacgccacgacggcagcgccgctacctgcgacgatttcgtgcaggcgatggaggatgcgtctaacgtcgatctgtcgcgcttccgccgttggtatagccagtccggcacgccgctgttgacggtgcgcgacgagtacgatgcggaaactcagcaatatcgcctgcatgtcagccagaaaactgcgccgaccgccgatcagccggagaagttgccgctgcatattccgctggatatcgaactgtacgacagcgaaggcaatgtcattccattgcaaaaaggcggcctgccggtcaacaacgtgctgaacgtcaccgaagcggagcagaccttcgtgttcgacggcgtggcgcacaagccggtaccgtcgctgctgcgcgaattctccgcgccggtgaaactggactatccgtacagcgatcagcaactgaccttcctgatgcagcacgcacgcaatgaatttgcacgttgggatgcggcacagagcctgctggcgacctatatcaagctgaacgtggcgcggcaccagcagaagcagccgttgtcgctgccgctgcatgtggccgacgcgttccgcgcggtgctgctggacgaaaaactggatccggcgctggcggcgcagatcctgacgctgccgtcggagaacgaaatcgccgagctgttcaccactatcgatccggaagcgatcgccgcggtgcacgaagcgatcgtacgctgcctggcgcgggagttggccgatgaatggctggcggtgtatcacgccaacaagaccgacggctaccgcgtggagcatgccgagatcgccaagcgcgccttgcgcaatgtgtgcctgggctatctggcgttcggcgaagatgtggcgctggcggaccagctggtgaacgaacagtatcgccaggcggacaacatgaccgactcgctggcggcgctgtctgctgcggtcgcggcccagctgccgtgccgcgatgcgctgctggcggcgttcgacgagcgctggcatcaggatggcctggtgatggacaaatggttcgtgctgcagggcagcagcccggcggcagacgtgttgagcaaggtgcgcgcgctgttgcaacaccgctcgttcagcctgagcaacccgaaccgcacccgttcgctgatcggcggcttcgcttccggcaacccggcggcgttccatgccgcggacggcagcggctatcagttcctggtggagatcctcagcgatctcaaccagcgcaacccgcagatcgccgcgcgcctgatcgaaccgctgattcgcctgaagcgttacgatgccggccgccaggcgctgatgcgtaaggcgctggaacagctgaaagggttggaaaacctgtccggcgatctgtacgagaagatcagcaaggcgctcgacgcctgattttttcgcgctagagacatcaagggacggcctgggccgtccctttttcattcaattcgccgcccggcgcgcggcgtccgtcgcggcaggcggcgataacacccgttccagcacttcggcctccagttccgccagcctggccgagcctttgcggcgcggccgcggcagatcgatgctcagatccagcccgatatgcccctcttcaatcaggatcacccgatccgccagcgcgatggcttcgctgacgtcatgtgtgaccagcagtacggtaaaaccgtgttgtagccacagcgtttctatcagcccttgcatctcgatgcgcgtcagggcatccagcgccccgagcggttcatccagcagcagcaggcgggggcggtggatcagcgcgcgcgccagggcgacccgctgcttttgtccgccggacagcgccgccggccaatcgcgggcgcgatccgccaaaccgaccgcttccagggcttgcaacgccgcgtcgcgccactggccgcgcagccccagacccacgttatcgatcaccgttttccatggcagcaggcgcgcatcctgaaacatcaaccgggtatcctctttagcggcggcgagcggcgcgttgccgctgagcaaagcgccgctgctggcctgttccaggccggccaacaggcgcagcagggtgctcttgccgcagccgctgcggccaaccaccgccacgaactgcccggcggaaatgcgcagctgaatattgtccagcaccgtgcggttgccgtaacgtttgccgatagactccagcgtcaccggcgtgccttgcgcaaggcgagcgggaagggtcatagcgcttctccctgtttcagttgataggccggatgccagcgcaaccagacgcgctccagcagctgcgcgcccacgtccgccagcttgccgagcagggcgtacagcacgatcgccaccaccaccacgtcggtttgcagaaattcacgcgcgttcatcgccaggtagccgatgcccgaattggccgagatggtttcggcgacgatcagcgtcagccacatgaagccgagagcgaaacgcacgccgaccataatcgacggcagcgcgcccggcagcaccacctgtgtaaacaggcgaaaaccgctcaggccgtagctgcgggccatctccaacaggccgcgatcgatgtttttgatgccgtgataggtattgagataaatcgggaacagcgtaccgagcgccaccagaaagatcttggcggattcatcgatgccgaaccacaggatcaccaacgggatcagcgccagatgcggcacgttgcggatcatttgcaccgagctgtccagcaggcgttcgccccagcgcgacagcccggtaataaagccgagtatcagtccgatgctgccgccgatggcgaagcctaacaacgcgcgctggctgctgatgctcaggtgctgccacagttcgccgctttggctcaggcgccagaaggcggccagcaccgcactcggcgccggcaaaatgcggttggagagccagccggtttcgacggcgatttgccagatgatcaccagcgccagcggcagcgtccagggggccagccgatacaggatgcgttgtacgttatttgccatcggggcgctcctcagctctgcgatactttttgcggaacatagatgttggccaccacttcgccctgcggacgcaccggctgaaggcgagcgggcgtttcctcctgcgctagatcgaggtgcgggaacagcagttcgccgacgcggtaggcctcttccagatgcggatagccggagagaataaaggtgtcgatgcccagatcggcatattcctgcatgcgcgccgcgaccgtcgggccatcgcccaccagcgcggtgccggcgccgccgcgcaccaggccgatgccggcccacaggttcgggctgatctccaggttatcctttttgccgccgtgcagcgccgccatgcgccgttggccgacggagtcgaagcgcgcaaaggcctgctgcgcgttggcgatggtttcctcatcgaggtgggcgatcagccggtcagcggcgcgccaggcttcttcggtggtttcccgcacgatgacgtgcagccggatgccgaaacgcacctggcggcctttcgccgccgctttggcgcgcacctcttcgatcttcgccttaacctgcgccggcggctctccccaggtgagatacatttctacctgctcggcggccagatcctgtgcggcggcggaggatccgccgaaatagagcggcgggcgcggctgttgcaccggcgggaacagcagtttggcgcctttcacctgaatatgcttgccgtggaaatcgacggtttccccttccagcacccggcgccagatgtgggtgaactcggttgaggcttcgtagcgttcttcatggctaaggtgcagcccctcggccgccagctcttccggatcgccgccggtgaccagattgaacagcgcgcgcccgttggacaggcgatccagcgtcgccgcctggcgcgccgccagcgtaggggagatgatgcccggccgcagcgcgaccaaaaatttcagccgctgggtgaccgggatcagcgaggcggccaccagccaggagtcttcgcaggagcggccggtggggatcagcacgccgccgaatcccagccgatccgccgcctgggcgatctgctgcaagtaaccgtgatcgacgctgcgagcaccctgtgcgctgccaagatagtggccgtcgccgtgggtgggtaaaaaccagaaaacgttcaggctcatcgtcaatgctctcccgtatttattgcgcgcttgggcgccagatgcgttgcgagatgtcgaccttcaccggcaccagccggttggcgtaaaacaggtcggcggtttgctgctgcgcggcgatggtatgcgcatcgagcggtgtgatggcggtcggggggcggtgatccagatagctggcgatcaccggttccggcagccccatggcgttggccagcaaggtcacgctttgcgcccggtcgctgcgggtgagcgcatcggcctgggtcagcaccgtcaggacctggctgataaaggcgccgttggcttcgacataagggcgtgccgccagatagaaggagccggtctggttcagatcggtgccgtcgccgagcacccgaacgccgccctgcagcagcgcggcggaataataaggatcccagatcgcccaggcatcgacgttgccctgttggaatgcggcgcgcgcatcggcgggcgtcagataggcgggctggatatccgtaaatttcagtccggctttttgcagcgatcgcagcagcaggttatgtgagctggatcctttctggaacgcgaccttatggcctttcagatcggcgacggttttgatcgggctgttttccggcaccaggatcacttccgccttcggtttgggcggctcaacgccgacatacagcagatcggccccggcggcctgcgcgaagatcggaggaatatcgccggtgctgcccagatcgatgctgccgacgttcagggcctccagcatttgcgggccggcgggaaactcgatccaactgatgcgggtggcggggaaacgttcctccagcagccggtggctcttcgccagcaccagactgaccgatcctttttggtagccgatgcggaattgcgccggatcctgagcgacggcggcgttggcccaaaccagcgacagcaggccggtgaaggcggcggcgctcagccaacgccgcaaagcaatgcgttgtttcattcaggctctccttttccaggcgtttcaggcggtttgacgcgccgccagtggcgaggcgacgcgcagcgccggcggtttgcggcggccaagtgccagatagaaactggccagtgcctcttccagccgggcggccacggcgtcggtgagcgtggcgccttcgtcggtcagctggatctggctgtcgtcggcgaacacgccgtgcagcacctcttgcgctttcagcgccgccagtaccggtttcaacgcatagtccaccgccagcatgtggccgatcgaaccaccggtcgccagcggcaacaccaccttatgatccagagcgcgttccggcagcagatccagcagggttttcagcgcgccggagaacgacgctttataaaccggcgtggaaatcagcaggccgtcggcctgcgccagctgctcggcaaacgccttgatcgccggactgttgaagttggcgtacagcagatcttcggcgtcaaagtcgtgcagggtataggccgtcacttccaccccttgctgccgcagccagttctgactcagcgagagcagcgcggcggaacgtgatgggatgcgtgggctaccggccagtgatataacgcgcattgccactccttataactaaaagttaggtttaattagaaaatcaatgggaagtgttttaaacctaccagcaaccgggcgcgttttttaaatctcattttttgatttggatatgcgcaaaagcggattagcgccgatttggcggtgaagagggaaaacgattgcgtaaaaacggctttttttgcctttaatcaattccaattaggcgggggataccggataatacgcccccggtttgcaaccgggaaatcaggagagtccatgtactaccccctcatcaggaaagcgttgttccagctcgatccggagcgcgcgcacgaagtgacctttcgtcagctcagccgtattaccggcaccccattagcgtttcttgtccgtcagtccgtgccgaccaaaccggtcaactgcatggggctgtcgtttaaaaacccgctgggattggctgccggtctggataaaaacggcgaatgcatcgatgcgttcggcgcgatgggcttcggccatgtggaagtcggcaccgtgacgccgcgtccgcaaccgggcaacgacaagccgcgcttgttccgcgtggttgaggcggaaggcctgattaaccgcatggggttcaataaccatggtgtggacaatctggttgaaaacgttaagaaatcccatttcggcggcattcttgggatcaatatcggcaagaataaagacacgccggtcgagcagggcaaagacgattatttgatctgcatggataaagtttatccgtatgccggatatatcgcgattaacatctcttcaccgaatacgccggggttacgatccttacagtatggcgaagcgctggacgatcttttggctgcgattaaaaataagcagcaggaattacatgcgcgtcatcacaaatatgtgccggtggcggtaaagatcgcgccggatctttcagaagaagaattgatccaaattgccgatagcctggtgcggcataatatcgatggcgtgatcgccaccaataccacgttggatcgaaaattgatccaggggttgaattactgcgaacaagcgggcgggttaagcgggcgtccgttgcaatcacgcagcaccgaagttatccgtcgtctctccaccgaactgcaggggcgcctgccgattattggcgtaggcggcatcgattcgctgacggcggcgcgcgaaaaaatggaggccggcgcgagcctgctgcaaatttattccggatttatctatcacggcccgcgtttgattaaagatatcgttacccatatctaatatttttcctctcattttattccgggggtttatttctgcccccggctcgtctatattttgttcgttagcttaaatatcgttcgcggaattatccgatgtttaagcgatttcatcggtgataaaatcgccttttagggtgagtgcggcgttggcataggcagcgagaaggatacgaaatgaagataaaacctgacgataattggcgttggtattttgatgccgaacacgatcggctaatgctggatttagctaatggtatgatctttcgttcacgtttcccggccaaaatgttaacgccggacgcctttgatgaatgtgctttttgcgtggatgacgccgccctttatttcacctatgaagaacagtgcaagcaggtcaagcttagccatgaacagcgcgccgagctggtgctgaatgcgctggtcgcctatcgcttcctgaaaccgctgatgccaaagagctggcatttctcgcagcagcattacccgctgcagccgaaaaacggcgagctggcggcggtgaaagtgatggagagcggcgcggaagcgcgcttgctggtggtggaggccggggataacgccagcctgtgcctgctggcgcaaaatcagctgacggtcgccggccgtaccatggtcttgggcgacgccatcaaggtgatgcacgatcggctgaagccctgcgcacaggatgaaagcgccgccccggcttacgacagggcggtataaggcggtttacgccagggtcaaatcacttttcgggatgcagctgcagcacaggatggtgccgttgtcgcccagcgcgcttttcttcaggggcgcgacctcaccgctcagcaacgtaatgcggcaactgccgcaaatcccggcgcggcaggagtaaggtacgcggatgccttgctgttccaactgttcgagcaagatctgctggttgttgccggtaaacacctttccttcatattcgatcgtgacgctgtgcgcgctgtcttgcggcgcctgcacgctctccaccactttgcctgcgccataagggcgcggcggcttggtcgacagcacttccaccgtatcgcccacgcggatgatgccgctgttgcgggcgatcatattctggccgaaatcgatatcgccgttgtcggcggagcggaatttttgcagcgtgctgagcggttcgccgctcgggtgcttgcggccgcgctcggtgctgacggtggtgagcacgcagcggctgcagggtttcaccagatcgaacatcacgtcgccgacgcggatcacctgccagccgtcctcggcccaggcggtggcgccactcaccaccagattggggcggaactgctccagcttgatgctgccagggcaacgctgctgcagatcgttaaacgaagcctggttaatcagcagataaggatagccgtcggcaaacgtcagtgggatttcggggtgcttcttcacccggcgggtcagctccggccccagccagcgcagctgtacgtcgcgctggaaatagccgctcagccagcggttgatctcatccggcgcggttagcgcggtgaaatggttgccccacacctcggtcggctgcggcgcggcggcgaagtcgctgaagcgaatggcggcgctttcgccgtccggcgcggtcaggaatagcccgtccggcaacagcgccggtgtgaacagcaccatctgcgggtattggcgcgcggtaataaaggtgccgtccggctcggtgatcataaagttgcggtcgaaggccagaccgctgctgccgacctgggcgtaggaaagctgcaggccgcgcagtgatttaaccggatggacgtagagtctggaaagcgtgatcacccttatctccgtgcgatgattaaatagaagggagcaactttatgacaagcggtgcggattagctataatgcgcaacaattttctttttggtgataagtacgatatgaactctctgtttgccagcacggcgcgtggattggaagaactgttaaaaagcgagctggaagcgcttggcgctcacgactgcaaagtggtgcagggcggggtacattttcagggtgacgatcgtcttctgtaccaaagcctgctgtggagccgcctggcttcgcgcattctgttgccgctgaacgaattccgcgtgcacagcgatctggatctgtacctcggggtgcaggcgatcgactggccgagcatttttggcgtggataaaacctttgccgtgcatttcagcggcgtgaacgaagagatccgcaacagccagtatggcgcgctgaaggtgaaagacgccatcgtcgacagctttacccgtaaactcgaccaacgcccgacggtcgccaagcagcagccggacattcgcgttaacgtcttcctgcaacgtgatatggctagcgtggcgctcgatctgagcggcgaaggcctgcaccagcgcggctaccgcgatctcaccggccaggcaccgctgaaggaaaacctggcggccgccatcgtgttgcgttccggctggcagccgggcacgccgatgctcgatccgatgtgcggctccggcacgctgttgatcgaagcggcgatgatcgccgccgatcgcgcgccgggtctgcaccgtcaacactggggcttcagcgcctggaatggccacaacgccgaactgtggcgtgaagtcaccaccgaagcgcaggtccgcgcgcgtcgcggcctgcaggaaaccgcctctcgcttcttcggctccgatatcgatcgccgggtgattgagatggcgcgcggcaacgcccgccgcgccggcgtcgccgagctgatcaccttcaacgtcggcgacgtcgcgcgcttgaccaacccgctgccggaaggcccgcacggcacggtgatcagcaacccgccttacggcgagcgtctggaaagcgaaccggcgctgatcgcgctgcacaacatgctggggcgcgtgatgaaaaacgccttcggcggctggcagctttcgctgttcagtgcctcgccggagctgttgagctgcctgcagctgcgcgccgagcgacagttcaaggcgaagaacggcccgctggagtgcgtgcagaaaaactatcagctggcggcaagcccggccggtagcgccaccggcggcgtgcaggtggcggaagatttcgccaaccgtctgcgcaagaatttgaagaagctcgacaagtgggcgaagcaacaaggcattgaatgctaccgcctgtacgacgccgatctgccagaatacaacgtcgcggtggaccgttacggcagcaaggtggtggtgcaggagtatgcgccgccgaaaaccgtcgatgcgcagaaggcgcgtcagcgcctgttcgatgtgatcaacgcgacgctggcggtgctggaattgccgtcgaatcagctgatcctgaaaacccgcgagcgccagaagggcaaaaatcagtacgagaaactggcgcagaagggcgagttcctgctggtggaagagtataacgccaagctgtgggtcaacctgaccgactatctcgataccggcctgttcctcgatcaccgcatcgcgcgccgtatgctgggcgagatgagcaatggcaaggacttcctcaacctgttcgcctataccggcaccgccagcgtgcacgccgggctgggcggcgcgcgcagcaccaccacggtggacatgtcgcgcacctacctggaatgggcggagaagaacctgcgcgccaacggcctgaccggccgtcagcatcggctgatccaggccgattgcctgtcttggctgagcaacgccaatgaacagttcgacgtgatcttcatcgatccgccgacgttctccaactccaagcggatggagaacacctttgacgtgcagcgcgatcatctggcgctgatgaaagatttgaaacggttgctgcgccgcaacgggaccatcatgttctcgaacaacaagcgcggtttccaaatggatatggcagggctgagcgcgttgggtctggaggcgaaagagatcaccgccaagacgctgtcgcaggattttgcccgtaaccgtcagatccacaactgctggctggtgactcacgccggcgaaggaaaataattactatgtcgttaatcagcatgtccggcgcctggctctctttcagcgatgcgccactgttagacaacaccgaaattcatattgaagacaacgagcgcgtgtgtctggtcgggcgcaacggcgccggcaaatccacgctgctgaagatcctcggcaaagagatcccgctggacgacggccgggtgatctacgaacaggatctgatcgtggcgcgtctgcaacaggatccgccgcgcaatatcggcggcagcgtgttcgacttcgtggcggaaggcgttgcggagcaggcggaacacctgaaggcctatcacgcgatctcccacctggtggaaagcgatccgagcgagaaaaacctggcgcgcatggcgcaaatcatggagatcctcgatcaccaggggctgtggcagctcgacagccgcatcagcgaagtgctgctgcagctggggctgaacggcgacgccgagctttcctcactgtccggcggctggctgcgtaaagcggcgctgggccgcgcgctggtgagctcgccgcgcgtgttgttgctcgacgaaccgaccaaccacctggatatcgaaaccatcgactggctggaaggtttcctgaaagagttcgacggcagcatcgtcttcatctcgcacgaccgttcgtttatccgcaacatggcgacgcgcatcgtcgatctggatcgcggcaagctggtttcctggccgggcaactacgatctctatctgcagagcaaagaagaagcgctgcgggtggaagagctgcaaaacgccgagttcgaccgcaagctggcgcaggaagaggtctggatccgtcagggcatcaaggcgcgccgcacccgcaatgaaggccgcgtgcgcgcgctgaaggcgctgcgcgtcgagcgctcgcagcgccgcgaagtgatgggcaccgccaaaatgcaggtggaagaggcgacccgctctggcaaaatcgtgttcgagctggaagacgtcaattatcaggttggcgaaaaggtgctggtgcgcggtttctccgcccaggtgcagcgcggcgacaagattgcgctggtggggccgaacggctgcggcaaaaccacgctgctgaaactgatgctcggtcagctgaaagccgacagcggccgcgtgcactgcggcaccaagctggaagtggcctatttcgaccagcaccgcgccgatctcgatcctgagcgcacggtgatggacaacctggcggaaggcaagcaggaagtgatggtcaacggccgtcctcgccacgtattgggctatctgcaggacttcctgttccaccctaaacgcgcgatgacgccggtgaaggcgctgtcgggcggtgagcgtaaccgcctgctgttggctaagctgtttctgaaaccgagcaatctgttgatcctcgatgaaccaaccaacgatctcgacgtcgaaacgctggagctgctggaagagctgatcgacggctatcagggcaccgtgctgctggtcagccacgatcgtcagttcgttgacaactcggtgaccgagtgctggatcttcgaaggcaacggcgtgatcaatgccttcgtcggcggttactacgatgcgcatcatcagcgcgcgacggcgaaaccgattcgtcaggcggcgccgagcgcgagcaaaccggcggcggagaaaaaggccgaacagccgaagaaaacggcggccaagctgagttacaacctgctgcgtgagctggaacagttgccgcagcggctcgaacagctggaagcggaaatcgaagcgctgcaggcgcagatgagcgacgccgactttttcacgcggccgcatagcgaaacgcaagaagtgctgacggcgctggctgatgccgagcaagcgctggaacaggctttcgcccgttgggaagagctggaagcgatgaaaaacggctgaccgttgcgatgccgcccgcgcgctgctgcgggcggcatcgacgtgccggtgagcgacgttatttaggaggaatatggtgtgttcccacaacaatcatcagcagcatagtcattccgcaccctcggcggcgcagcaggataacctgatgctgtgtccgcagtgcgacatgctggtggcgctgccgccgctggcctatggcagcaaagcggtatgcccgcgctgcaaaaccacgctcagcgcccgctgggacgagccgcgcaagcggccgatcggttacgcgctcagcgccttgttcatgctggtgctggccaacattttcccgtttatcaacatgcgcgtcgccggcctcggcaacgaaatccggctgatccaaatcccggaagtgatggtggcggaagactacgccagcatggccaccttgtttatggtgttcgtgcagctgatcccggcgttttgcatggtggcgattatcctgctgtgcgccagagtgcgcttgccgctggggctcaaagagtggatggctcgggtgctgttccagttcaagacctggtgcatggtggaaattttccttgccggggtgctggtcagcttcgtcaagctgatggcctacggcgatatcggcatcggcagtagcttcgtgccttactgcctgttctgcctgctgcaggtgcgcgccttccagtgcgtggatcggcgctggctgtggcaggatatcgaaccggcgccgcgactgcatcgcccgctgacggtggggcgcaccggcatgcgccagggcgtgcgctcctgcgcgtgctgcacggcgatcctgccggccgatcaggtgcgctgtccgcgctgtcacaccaagggctacgtgcggcgtcgtcacagcctgcagtggacgctggcgctgctggtgacctctgtcatgctgtatattccggccaacctgatgccgatcatggtgaccgaggcgctgggcaacaagatgaactccaccatcatggcgggggtgatcctgctgtggggggacggctcttatccggtggcgatggtgattttcatcgccagtatcatggtgccgtcgctgaaaatgttggcgatcggctggctgtgctgggatgcgaacggcaggaagaaaccgcgcgccgacagcgagcgtatgcatctgatttatgaagtggtcgaattcgttggccgttggtcaatgatcgacgtgtttgtgatcgccgtgttgtcggcgttggtgcgaatggggcagttgatgagcatttatcccgcgacgggcgccgtgctgttcgcgctggtggtgatcctcaccatgttcgccgccatgacatttgatccccggctgacctgggatcgcgcaagtgaaacaatcaacaaggagccgcaaggtgacggaaaataatcatagcgtcgcagacgttgagaagatcaaacgctggtcgccggtgtggatcattcccatcgtgaccgcgctgatcggcgcctggatcctgttttaccacttcagccatcaggggccggtggtgacgctggtgaccacgacggcggaagggctggaagcgggtaaaaccaaaatcaaaagccgcagcgttgacgtcggggtggtggaaaccgtcacgttgagcgatgacctgagcaaggtgatggtgcaggctcgcctcaattccggcatggaaaaattgctgcgccaggattccgccttctgggtggtgaagccgcagatcggccgtgaaggcgtctccgggctgggcacgctgctctccggcgcctatatcgaactgcagccgggcaacaaaggcaaagacggcaaagacaactatcagctgctcgatgcgccgccgctggcttccccggatgccaaagggttgcgcatcgtgctggacagcgagaaatcaggccagctcaacgccggcgatccggtgctgttccgcggttatcgcgtcgggtcggtggaaaccagctacttcgatcctaaagaacgcgccatgcgctatcagctgttcatcaccgcgccttacgatcagttggtcaccaccaacgtgcgcttctggaaagacagcggcgtggcgttcgatatgtcggcacagggcatgcgggtggagatgggctcgttgaccacgctgttcagcggcggggtcagttttgacgtgccggacggttgggatcgcggcgaacaggcgaaagaaaaggcggaatatcagctgttcgacaaccagcgcagcacgcaggattcactgtataccgtgcataaggattacctgctgttcttctccgactcggtacgcggcctgcagccgggcgcgccggtcgagttccgcggcatccgtctgggtacggtggcgcaggtgccgttctataaagacggcatggcgcagcgtctggataacgattaccgcattccggtgctgatccgcatcgagccggatcgcttccagaaacagctgggcggcaacttcgatattgaagggcacctgaaagatgcggaatctcgcggcatgcgcgcctcgatgaagtccgccaacctactgaccggttcgctgtacatcgatctcgacttctatccgcaggaaaaaccgtggaaagggccgcgcgagctgttcggttatccgctgatgccgaccaccagcggcggtctggcgcagatccagcagaaactgatgcagacgctggataagatcaactcaatgccgatcaatccgatgatcaacgaagcgaccaagacgctggcggagagtcagaaaaccatgaagtcgacgcagcagaccatgaagtcgctgaacgacatcatcgccagcaaagagatgcaggcgctgccgcaggacatgcagaaaacgctgttggaactgaaccgcagcatgaaagggttccagcctggttcaccggcttacaacaagatggtgggcgatatgcagcgcctcgaccaggtgttgcgtgagctgcaaccggtgctgcgcaccctgaatgagaagagcaacgcgctggtgtttgaagccgccggcagcaatgaccctcagccgaagaaggccacgaaatgatgaaatggatcccggtagccctggcgctgttgctcagcgcctgcagcagttcaccacaaaagacttactatcagttgccggcgctgggtgcgcctgctgcggccagcagcagcggcgcttccacgcgccagctgtggctggaacacgtgagcgtggcggattatctggcgcagagcggcgtggtgtatcagaccaacgacgtacagtatgtgatagcccagaacaacctgtgggccagcccgctcgaccagcagttgcagcaaacgctggtcaccaaccttagcagcgcgctgccggggtgggtggtctcttcgcagccgatgagcagcgatcaggatgtgctgaacgtgaccatcagcggctttcacggtcgctttgacgggaaagcgatcattcgcggcgagtgggtgctgaaccgccaggggcgtttgatcaaaaggcctttcaacctggagctgaaacagggtgaagacggctatgatgccctggtgcgcactctggcgcaggggtggcagcaggaagcccaggctatcgcagcacagatgggcggcatttagtcataatttggtctaaaatcgtctaatccctgtcggcgtgaaaatccgttttttctcgctggcagggatttctatttcatttcaaacagttaacccctttcccagcagatcagccacttagcactttcctcgggcgtagctcacaaatatgacattggcgtgaattttgcgcattgatcttctcttcttttagcgctattgattactcgtggctgcgcaaaaagcagccattgttttctttccaccagaccaaaatgagggaaacgaggcatgaagagacagaaacgcgatcgtctggaaagggcgcattcgagagggtatcaggcaggtattttagggcgttccagggaacattgtccctaccaatcatcggtggacgcccggtctcaatggctgggaggttggcgagaagccatggaagacagggctgtgaccgcttaagcggctccctgtcaaataaaaggaataacctccgcccttggcggaggtttttgtttgtgccgtttactcgtcctgccagcgtttcagtagaatactcgcattcacgccgccaaagccgaagccgttcgataaggcgtaggttatgttcatcgattcagcccgtttcgcgaccaggtgtaaacctgccgccgccggatcgggattgtccagattcagcgtcgcgggggcgatctgatcgcgcagcgccaaggcggtaaagatggtttccagccccccggcggcgccgagcaggtgcccggtggcggattttgtcgaggttaccgcgatgcttcctgtcgtgccaaacaggtgtttgatggcgttgatttcgcccagatcccctacgggtgtcgacgtcgcgtgtgcgtttaaatgctgaacctcttctggggcgatgttcgcctgcctcaacgcgattttcatcgcccgataagcaccgttgccgtcttcggcaccggaggtcatgtggtaggcgtcggcgctggtgccataaccgacgatttccgcgagcggtgtggcgccgcgcgccagcgcgtgttccagcgtttcaatcaccagcatgccggcaccttcccccatgacaaatccgtcccgggcactgtcgaaaggccgggaagcctgccttgccaactcggtcggagcggtggacatggcgcgcgcggcggcgaacccgcccaggctgacggtatctatagcggcttcggtgccgccgcacagggcgatatcggcttcatcattgcggatcatacgcactgcgtcgccaatggcttgcacgccggcggcacaggcggtgaccggcgcgccaatcggtcccttgaagtggtgtttgattgaaacgtggccggccgccagattgaccaggaatgaggggatggtgaacggcgacagccgcttggcgccgcggctgtcggtggtgcgcaccgcctgggcaatcgccgggaagccgccaatgcccgaggcgatgacggtggcggtgcgctcttgtttttcgtccgtatcggctatccagccggcctgacgaacggcttcatccgccgccgccatggcaaacaggataaagcgatccattttcttttggtccttgggggcgacggcagcgtcggggttgaagcccgcttcagcatcctgcgccagcgccggaacctgacctccgaccttgaccggtaaatctgcaacgatctcgtcaggcaacgctcgaatgccggactctccttttaacaaacgttgccagatggcttcaacaccgcaccctagcggtgaaacggcgcccatgccggtaatgacgatacgacgattgctcatgatggctccttggtaaattcgggtaaatcggcgaggcgccgttgccgcatcagtgcggcgcgttgatgtatgccttcatttgccgcaggccctggtgccaacgtaataaactgcggcggcacctgctgttgggtatcgacattgaccaattggacctggatcggccgatcggtgcggccgtcgactaacaaggcgctgatgtcaccattgatcaaatggcgattgccccattctgaaagagctgccagcacggggagaaaatcgttgccgcgttcggtgagcagatactgatagcgaaccggccgcgtttgataacgttgcttatgcagaatgccgtgggctaccaaatccttcagtcgccgggccaggagagtcggtgacatccccagactttgttggaattcgtcgaatttggataacccctgaaaggcatcacgcaggatcagaatgctccaccattctccgacacgatctaatgaacgtgcgacggggcaaggtgcatcgctaaagcgggttttttgcatatcggcccttagttggtacatttattgtagttacatgggtggctatactaggtgattttaaggggcaagaaaataaccggatgcaaaaaacgctatcgtgtcgatagctggctgtgggaggggggcgctcaaactggcctgtggctttgaccgtttcgggcaggaaaagggtagagacaggagggataagtcggttcggtaacgggcgattaaaggaggtaggcagtctttaaacggtaagagaaagaaatgccatcacgctgggcgtgatggcatgcgaagagcattagcaaagaagacgatggccgccctctcgtctgcgtgattagaacgctgtggtatccttgaacagacccactttcagatcggtggcggtatagatcacttcgccgtcaaccagcacttcgccatcggcgacgcccatgatcagcttacgggtgatgacgcgtttgaagttaatacggtaggtcacttttttcgcggttggcagcacctggccggtaaacttgacttcaccaacgcccagcgcgcggcctttgccttcgccacccagccaaccgaggtagaaaccaaccaactgccacatcgcatccaggcccagacagcctggcatgaccggatcgccgataaagtggcaaccgaagaaccataggtccggattaatatccagctccgcttccacataacctttgttgtgagtcccgccgtcttcggtcatcttgaccacgcggtccatcatcaacatgttacctgccggcaacggtgggccaccggcgccgaacagctcgccacggccggatgcttcgaggtcttctttcgtataggaatcgcgtttatctaccatgttctcagtaagccttattttaatgaaggacgcaggttagctaacacgtgtacgctgaacaagtccgatcagccgtggttgaaccagttgagccagcgcagcggccaaggacgacggcgttcctgcaggctcacctgcgcaatccgttcctgaatggccgccaacaaattcggctgttgttcgtcagagtagaggcaacctgtgagcaaaggcaaggcttccgccgcgctctctaccgcccacagatggaactgcccctcgcgcaccgcgtcgacgatatcttgacgcagacacagatggcgcacgttggtcacgggcaatacgacaccctgtttgcccgtcaggccgcggcgtacacaaacctcgaagaaaccttcgatcttttcgttaacgccacctatcggctgtacgttgccgaattggtcgacggagccggtgacggcgatctgctgggtgatcggttgctgtgacagggcgctgaccaatgcgcatagctcagccagcgaggcgctgtcaccgtccacttcaccataagattgctcaaagacgatggaagcggagaagggcagctgctgatcaagatccagttcggcgatcagaaacgcctgcatgatcatcatgcctttagcgtgcaggttgccgcccagttcggctttgcgctcgacgtcggtgaactcgccgtcgccgagatgcacaacgcaactgatccgtgacggttcgccaaagctgcgtggatgaccgggataatccaggactgacagaccgttgatctgtccgaccacttcaccctcggtttcaatcaggatctgacccaactcaatctcatcctgcatacgctcggccagatagctttcgcgccattctcgggcatttaacgccgcctcgaacgctttggccgtaatgcgatcttcttcggcatacagtgcggcttcggatagctgctggccaagccaaaccggcgagagtggtagaatgccctgatcgccactgtaacgcacagcctggacgatcagcggcggccaggcgtcgttcgccagcatcggcaattgctggtcggcaatcacgccgttgacgtaaccgcaccactgcgtcatatcatcaacttcagtcagctgcagatcgtcttcgaattcaccgtagatcgcttgttcactcagttccggctcgatatcgtgaaaatcggccaggccgtgacgatcgccgactacaatcagccgcagatccagcggcatcggtggaatggctaccggcagcgggcgggtttcgtctggcgaaacccagtggaactggcgctggccgatcatttgcttcagccgcagccacagcaacggctgagcaagcagcgcccgcgccgacagaatcagaatgccgccgttggcctggtgcaccagacccggctgcagggtaatgtcgccattgtggatccgtacgcagccaaacagctgttccggttcaatccactcctggaacagacaagcgccgccggcggcaaaaggttcatcgccacggctggctggctcgacgctgaccttgccatcctgaatgacatagtggctgccgcggcatgccgtatttttcggcagcagtggtttgacggcgtgagcgatcagttccagatactctcgcgtttcttgcgctttcaacagcatgaaacgcggtggcgattgggggtggcaaaatagcgtcagggcattttccagccgaggctgaatggcggaaaagggcacgggtgccaactgagcggcggtatcaaatatcgcctgataaggcgttacgtccggcaataaagattgccattcaagtcggttattggtcaaagtgttagatgcaatcgttaaaaagggaaagggcgattatacaagaataacggcggcttgatacatgtggagtgccagttggcatcagggagtttgacatcgcgcggtgactgtgcaaaaaacagtctaaaagacggtttaattgccggggaaattcggcgcaaagctgttatgcttatttgaagttacgcggtcactgaagagctcaagatgaaatatcagcaactggaaaatctggagagcggttggaaatggaagtacctggtgaaaaagcatcgggaaggggaactcattacccgctacattgaaaacagcgctgctcaggaagcggttaacgagctgctgaagctggaaaatgagccggtaaaggtacttgcatggattgccgctcatatgaatccggaactggataaccggatgaaacaaacgatccgcgcccgccgcaaacgtcattttaacgcagaacatcagcatacgcgtaaaaaatctatcgatctggagtttttggtttggcaacgattggctgccctggcgcgccgccgtggcgttacgctgtcggaaaccgtcgtgcagcttatcgaagacgctgaacgcaaagaaaagtatgcgaaccagatgtcgtcgttgaaagaagacttgaaggcgattcttggcaaagatcccaagtaagcgcgtgagaacgcccctatggcgccaggcattgaatgttctggcaacaagaggacgaaaaaaaaccccgcattggcggggttttttattaggcgagtaaacttagccctgaggctgagttacaacgtctttgatacctttaacttcgatctctacgcgacgatctggtgccaggcaagcgatctgagctttggtagcgcggccagatttgtagccacaggtgttgcctgtaactgcatctgcttcacccataccacgtgcagagattttgtctgacgggatacctttggagaccaggtagtcaacaacgctctgtgcgcgttgttcagacagtttctggttgtactggtcagaaccaacggcgtcggtgtaacccagaacaactacggagccgtctttaggatccatggagctcagctgggtgtacagctgatccagagcctgctggccttctgctttcagagtagatttgttgaagttaaacagcacgtcagacttcagagtgaaacgcttggtttcaacaactggagctggagccggagctggtgctggagcaactacgtcatcctgaccgaagcggtaagaaacgcccaggctcagcatggtgttgtctggacgtgcgccaacggtacctgcgtcaccgatgttgcttacgaactggtaatccaggcgggtagcccagtttttggtcagtgcgtattcaacaccaacagcagccagcggagaaacgccggtgtcgtggtcgctcagacgctgaccagtacggccgtagttagctttggagtctgcacgccataccataccacccagacgagtgtagatgtccagatcgtcagcaattgggtagctcagtttagcggccagttgaacgccctgcgctttgaaagcaccgttgttcacgctgcctttgtaaggcatgcggccgagccagtcatagcccagctcgaagcccaggtattggtttgcctggtagcccaggaacgcgccggcacccagctgatctttgtgggttgggccgttgccgataccgttctggtaaccgttaccgtagaaaccagtgtcgtggtactgggaccagcccagtttagcaccggtgtaccaggtgttatcttttggagcggcttgcgctacggtagcgaaacctgccagtgccactgctaatgcgatagctgtctttttcattttgcgcctcgttatcatccaaataggcaatgagctttaaagctgtttaagcccttggttaaattccttcgccaaggtttaagccctcgtttgttactcgccagtttttctgacgttatagagcaaccttggcgatgtaaagtctacaacgtggcgcgaaagttacaagtgtgatgtgataaggctctaaaaaaaaacgcggaatcgtacatatttgctaacattcttagcctaaaaaagcggcgattcatcgagcgtttttgcctgccaaaccgcagccggactcgctttttgccttctcccacaaaggttccgcttagggggtgcgaaaatgatgggaaaaatcctaaatttacttaatgatacaaagaagagtgaatttttagggtagaacagtgtccgtgagtcgggctaatgtcacgttgagggcgcatgataaacccataggcattacccaattctgccgcacgtcttaattttagacgatcctcctccgttagctcgggcaaccagccgagaaccacgctgtaatttcccgtttgtagcgctttttccatcgcctcgaccgtattcaccgggctgatctggctcagttgcaccattttatctacaggcagaccggattgctgcagccattgcttgcttaatttttgctgcggcgtcagccacagaagccagcgagactgcttgcccaattgcagcagcaggggcaacagtaattgagccactgcgggctggcgctcgttgtaaacaagttcactgatcaagccattctctttgccgatatccgtgttcttcgcaacattgcgcgttgtataagagccatggccgaaatgaggttggtagagtgattgagtacgcataaagttcccgcccgtcgtgttactgtatgtttatacagtatccctgatttaggataagatcaactcaaattttcgtaacggctcgcataattgcgatcattttttgtaccgacggtttttgtgattggcaggcgggcggatagtgcgtatttttctaattagttgttcacgttacttttttcattgatgagagaaataatacggccagaacctaaaaaggaggaacgctatgaaaaggatgtcgacgagaaggatcgcgcaggctaaaaattgctttgcggcgctgggcgccatcacaacacgatcacagtttggcggctatgggctgctggctgaaggggtaatgtttgcggtggtagcggaaggggaattgtacttgcgggctacggtgagcatggaaccggcctttcgtgcccggggcatggtcaatatggtctattccaagcgcggtgtgcccatcaccttgcgctattactgggttgacgagtcgctgtggcgggaacgcaacgagctggtagggctggcctggcaggccatcagggaagcacgccgagagcagcggctcaaggctggcgatcacggcagattgaaggcgttgccaaatatagatgtcaacatggagcgcttgctatggcgagcgggtattcgcaatgcctatgacctgcggctgcatggcgctaaacgtagctatcttcgcctgctgcaacagcagaccaatctgggtctgcgcgtgctgctgtcgctgggcggcgcgatagccggctatcatcaggcggcattgccgaccgaattgcgcaacgaactggtgcgctggttcgatcatacgatggctatgcgccgccatgggcatgagccagtagttcagggcccatcgagcgggccctgaataattaggttgccttattgatttgggtatggagtgcggtgagttccggcagcagctcgagcattagccccacctgctgcaaaaccaactgttctttgctttcaggttccggaacggctgtgcgaatgcgctccgccagctgttccagcgcttgcgcaatgcgctggctgttccgttcttcttgatgtaaggcgccgtccacgtaacacacggcatcattgagcagatcgagtgtggcaggggtattcaaccgctcgcggtgcgcccccaacgccgagatataactcaggagagtgtggttcaggcagagcagacggaaggcggcttcttgcaacgccttgtcggccttgggatcggcggacatgttggagatgaccgaagccagttctgcatcgctgttgtgggcatctcgccgcgcgatgcggtaagcgagcccgttatccttaccctgatgatattgcaccagaatggcgtccagatagcgacagttggcattcagcgttttatccactatcgccggcagttggcggaacttccagtccggccagataaagctgaccgccgcccaggcgatggcgcaacccaacaaggtatcgtaaacgcgcggggctgctacttcgaaaccttcacccaacaggttaaagcacagcaacacaagcagcgtaatgaacatcgttgcatgggcatactgcacggtgcgaaaagcgaagaacaggacaccggtgatgacgatcaacaccagttgtccttccacggaaggcacgaaatagaggattggcaggccgatcaggataccggccagagtgccgatgatgcgcagcgccaggcgccggcgggttgcgttgtagttcggttggcagacgaacaggctggtcaacaggatccagtaaccgtgttgcatgccggtgaactggatgaaggcgtaacccacgcacagcactaccgacatgcggatcgcatggcggaacagggccgactgcggcgtcaaatggcggctgatgcgcagtcggatgtcgctccagccggttaagcgatcgtcggccaggctgttctcttccgcctgcccgctggccagcgtctgctctgactcgatattggccagttgcgcatcgatcgcatgcaggtttttcagcaggtgcgccagcgctttggtttgctctgaattgccctgggtttcggttatgcgtgccaaggcctcctgaatgcggctgaaggctggctcaaaacgcgggttgtgctggtatttttgccgcagcaggatcgattgtgccagctggcggcaggcgcgcgcctgcatgctcagcaaacgctggaagcggaataaaatatcgctgtgacggaattgccggctgagcgcgtggtactgaacatgggaagagctggcgcgttcgtggatatcctgcgcgacaaaatagtagtgcaaggtgcggcgggtgccgcgttggccgcgatcgcctttcaggcgcgtcagcagcgaggctttggtctggttcagcaacgcgaccaacgcgctgttggccatcgcgacatccatccatggcaggtcggcgtcgcgttcggcgtcgggatcgaacaggttggccttggcatccagatagttggccagctgctcgtagcagcgtgccaggttctcttgcagcggccggatagggaacagcaggtggcccgccagcgtcagcaggttataccacagcgcgccgatcaccagcagcagcggttgctgataccaggcatcgtacatggcggtgccgagcatggtgtaaaccgcgatcagcagcgcgccgaaggcgatggtggcgtaacgttgccctaaggcgcccagcaggataaaaccgcaggttgaggtggttaagccaagggcgaacaaccagggatagggaaacagcagttcgattgaagcggaggcgacaaagaagcacaccaacgtgatcagtaggttgcgtaacctgccggccaggcggtcgtccaaatcggtcagtgccgctgccaccacgcccagcgtcagcgggatagtcagcttgggaatgcccagccaccagggaacggcggtggtgccgatcagcgcaataagaatgcgcaggtggtacagcagattgctgttgtaggtataacgacgtactgcgggtgcaaaagagagcacaaaaaactcctcaaacggagaaaaaattaacgctgatgatagtggcggcgagcattctcaatacgcgcttgctgagccatttctaccgagacgacgcggcgccccaccggccacagcgcgatggcggctattttgaaattggcgataccgaccggaatgccgatgattgaaacgcattgcacgataccggcggcgatgtgtgacaggcacagccaccagccgaacagcaccagccagataatgttgagcagtgagccgccggcggagagcagcgcattgcttttctccgggtacagttcatcgacatgtatcgcctcgttgccgaacggcaccagtgacagcttggtgatttcccagcaggagcgagtgagcggcagcgtgatgaccagtagcacgctgaacactgtcgcaatgagccagcctagcgtggtgaagaaaccgcccaacacaaaattaagaatattcagtacagtacgcatagacgtcattctgctctaatgatagccaaaccgcgatgcgggcgtattcacgataaaaacgcaaaatctattctaccctttttttagcgctagagtgccactgcttatcgcaggtaaactggcagatatccgttatttactctcaacatagtcatggcgcgacgatatggaacttaaagcgacatcgctggggaaacacctggctcagcacccttataaccgcgtgcggttgctgcacgccggcgttgaggtgagcggggaaaaacatgaatacctgatccccttcaatcaactgattcaggtcaggtgcaagcgcggcatcgtctggggcgagctggaatttgaattgccggacgaaaaagtggtgcggctgcacggtaccgaatggcaggaaacgcagcgtttttatcactatctgcagcaggcgtggcagcactggagcgccgaaatgagtgaggtcagcgccggcgtgctgcaacagcaggtggcgcagattcagcgtattgagcagcaagataaatggttcaaaaagtctgagctgggcaagctgcagcagcaaattcgtgaggctttctccgcgctgccgatgccggtagcgcgcctggatgaattcgataactgccgggccgattaccatctgtgtctgcaatggctgcagcaggggcaacgcagcgttgaacaacgcaaccggcagtggaccgatcgcatgctggagcaacatcacgacttcttccagaccgtcgagagctcgccgctcaacgacgcccagagccgggcggtggtcaatggcgaggattccgtgctggtgttggccggcgccggcagcggcaaaacgtcggtgctggtggcgcgcgccggctggctgctgcgccgtcaggaggcggagccggggcaaatcttgctgttggcgttcggccgccaggccgccggcgagatgaacgaccgcatcaaagaacgtttgggcgatgtcggcattcaggccaagaccttccatgccttggcgctgcaaatcattcaacaaggcagccgcaaagcgccggccatcagcaggttggaaaccgatgccaacgcgcgcaaagcgctgctgattacccattggcgccaacagtgcgcggagaagaaagcccaggccaaggggtggcgtcaatggttgaccgaagagctggaatgggaagtgccggaaggcgacttctggcaggataaacgtctcgcggatcggctggcgggccggctcgagcgatggctggggttgatgcgcatgcacggcggcagccaggcggaaatgatcgagcaggcggatgaagaaatccgcgatctgttttcgaaacgcatccggctgatggcgccgatgctgaaagcctggaaaagcgccttgaaagaagaaggggcggtggacttctccggcctgatccatcaggcagtcaacattctcgacaaggggcgcttcgtcagcccatggaaacatattctggtcgacgaatttcaggatatctcaccgcagcgtgcgttattgctggcggcattgcgccgacagaacaagcagacctgcctgtttgcggtgggggatgactggcaggcgatttatcgcttcagtggcgcagagttgacgttaaccacggcttttgccacccacttcggcgaaggggcgcagtgcgcgctggacacgacttatcgcttcaacgaacgtatcggcgaggtggccaaccggttcgtgcagcagaatccgcaccagctgaaaaaaccgctcaacagcctgagcaagggcaataaaaagtcggtggcgatcctgccgcacgagcagttggaacccttactggacaagctgagcggctacgccaagccagatgaacgcatcctggtgctggcgcgttaccaccatctgaaaccggaagcgttggcgaaagcggccacccgctggcctaaactgaatctggagtttatgaccatccacgccagcaaggggcagcaggcggaatacgtcatcattgccggtttgcatgaggggcgtgacggtttccccgccgtggcgcgcgagtcggtgttggaagaggtgctactgccgcggccggaggatttcccggatgccgaagaacgccgtctgctgtatgtcgcgttaactcgcgctaaacatcaggtatggctgttgcaggatcgtgagcacccttcggtattcgttgaacacctgcaggatcttggcgtaccggtgcagaaaaaaccgtaagctcgggcctggcggcagccaggccgtgaggactacttcaggcggtcttgcaggtagcgctgatagtcggggatagcgatctccacctcgcttttgaacagcggagagtcgatcagaaagtccgcggtcgagcggttggtggccaccggaatattccatacggtcgccagccgtagcagcgccttcacgtccggatcgtgcggcaccgcgttcaacggatcccagaagaagatcagcatgtctatcttgccttccgcaatcagtgcgccaacctgctgatcgccgcccatcggcccactcagcatgctggtgacgggaatgccgctggcgcgctgtatcaggttgccggtcgtaccggtggcgtacagctgatgctgcgccagaatagtcttgtggctttctacccactccaacagggcctgtttgcggtgatcgtgcgccaccagcgcaatgtgtttgcgcgcggcgatagtgcgggtagtcaattccatctcggtgtccttcgctaatcagggggatgtgcgacagattactgaaactgtttttcactgcctagcgtttgcgcttgaaaatgcgaagaaaaggcgcctttgcggggaaagacgccgggagggatcagcgaatcggttgtttattggcccagcgcaggaagcgcttctgtgtttccttgtcggcctgttggaaccagtattgcaacatctgttccgacacgttttcacctttcaacgtcaccgtcggggcattcagcggtgcgccggccaacgcgggggttgagggattgcctgcgttcgcctgcacaaaggtcggaacggaggctgggcggttctggcggttgtaatcggtcatcaccttttccaaatcggtattgaaggtgacgctgtcgggatgcagcgcatcatgccggaatggcaaggcgttgccgtctttatcgaccaccagataatttaacgttctgtcaaagcgttgcgcatcacgatcgttctcgatgcgcggcagttcgatcgccacttggctgatcttttgcgtattgaagctggcaaccagcggcagggaggtataggcctgtgtatgctggccagaacgtacggttttggtcactttaaacagcaactggtgctgcccgccatccagttcaaggctgtcggcaccttttaacaacgaacctgtcattttcttgccgtcgaccaccagcaggtcgatgtccggggagagtttcagggtcgtagccgcggcaggcatactgatgctgagcaacgccgcaaccaccagaccaaatttcatcattatctccttataaagtgacgtagctctaagtgttgaacacggcataggttgtgtcaaaatttttcaatcgggtattttgtttacatttttacatattttatcgcgattagacacgaccgtgcgcagctgaaccgcgacagcctctgaccataagattgcggtgaagtttccttcgcattagcgtttaaccgagcgaatgccgatcggttacactcgaaatggaaagtgacgcagtgataaacgggagttgaagatgcaagatcaagagattgttgagctgttgcagcaggtgaaaaccatcgcgctggtcggcgccagcgataacccgtcgcggcccagttatggtgtgatggcatatctgttggcacaagggtatcaggtgatcccggtcagcccaaaactggcggggcagacgctgctggggcagcaggtttaccctacgctggccgctatcccacagccggtggatatggttgacgtgtttcgcaattcggaggcggcttacggcgtggcgcaagaggcgatagcgatcggcgccaaggcgctgtggttgcagataggggtgatcaacgatcaggcggcagcgctggcgcaacaggctgggctgcgcgtggtgatggatcgctgcccaaaaatagaaatcccgcgtttagggctggagcgctaaataaaaaaagggcctggcgcgatgccgggccctctcggggtttctcaggtcttggcgcggtcaattgcgcaaacgtggcgcctgtaactggtgacggatggattccgccagttcatccagcgatggttgctcggggtgcgcctcctggggctcaccatccagctgcgcttccgccagataggtgtgcaccggttggccttcctcgtcttccatcaccacgtggtaccaaggggcggaacgcagttcgtcgttcgccgctatctcgtcagctttgggttgttctaaagagtattccgggtcgatatcgataacgacccccaaataccccagcagtttatgcctaacctgttgtccgataccgaatttgctggcaatcatgatgacctcctgagaaacaatgccttgctcatatatgggggcaaggcagcgcatttcaagttacatcacccgacaagcgaagcctttcagatacagcccctcaggatacgtggcgatcaccgggtgatcggcagcctggcggaactgctctataaattgtacatcacgtccggcatctacagcggcatcggccaaaattttctggaacaggtcggtcggcatcaggccggagcaggagaagctgagcagaatgccgcctggattcagcaactgcagcgccagcatgttgatgtctttgtaaccgcggcaggcgctggccagctgattcttgttctcgacgaacttaggcggatccatgatgatcagatcgaatttttcgccttgagcgcggtagttgcgcagcagctggaacacgtcatcgcgaacgaactccgccttgttcagatcaagcttgttgagttcgacgttctgtttggcgatgtccagcgccgcctgcgaggtatccacgctgatcacctgcgcgcagccgcccatcagagcggaaacggcgaaggcgcctgtgtaggagaagcagttcagcactcggcggccggcagagtagttccgcgccgccaggcggctgtcgcgttggtcgaggtagaaaccggtcttgtgcccttgctgaatgtccaccagcagcttcatgccgtgctcggtaataggcagcagttccggcggcagatcgcccagcaccgggccctgcgccagcggcaggccttcttttttacgtaccgcaacgtcggagcgatcgtaaatcgaacattccgggtagcaatgctgcagggcggaaagcagggccgggcgctggtattcggcaccggcggacagcagctgcagcaccaggaaattctggaagcgatcgatagtgatgcccggcaggccgtcggactcgccggcgatcaggcggtatccgtccagaccgtcacgctgcgcgacccaatcacgccagctttgcgcttgctgcaggcggcgaatgaagaaatcgatgttaatgtcttcatcctgttggaaagtccagacgcgtgcgcggatctgcgactcgggcgaataggcgccgcgcgccagccacttgccctggctgtcgaggatatcgatggtttcaccggagagggctttaccctcaacacgttgaacggcgccggagaacacccaagggtggcgacggagtaaggacttttcacgtcctttggcgagaaacaggcgtacggtcataattaataatgctgccagctaggatagaaagagtgacacggcggtgcaaaggcacggcaatgccataatgaaaactgaattaagggggcgattatgacacaagtttgcattgctgcgtatgtgtatggcgtggtgcagggggtagggttccgctattccactcagcggcaggccgaggcgttgggggtgaccggctatgcgcgcaatctcgatgacggcagtgttcaggtggtggcctgcggcacacaggcgcaggtggataagctggtggagtggctgaaacagggcggcccgcgcagcgcgcgcgttgaacgcgtgctggtggaaccgcagggggtggctgattacgccgggtttggcattcgctattgaatgttcgcctgcagcggcgctgcgggcggcgcggtcagatgcatttcaccggtttcggcaagccggcgattttggtggcttgtttggccggccctttcggaaacaggcgatacagatagcggctgttgcctttttcttcgccgtatttctgcgccatggctttgaccagcatgcgaatagccggcgacgtattgaattcctgatagaagtcgcgcacgaagcgcaccacttcccagtgtgcttcggtgagcacgatctcttcctgcgcggccagcagcggcgccaggccctcatgccagtcggcgctgtttttcagatagccctgcgcgtcagtgtcgataacctgaccttcaaactccaacatactgcctcgataacggataattcggaacggccgccagtttagcaaattttttcggccgccaaaaacaaagccccgccggagcggggcctggaaggcatgcgtaacgcgcgatcagttgctgcgggcgaagcccagaatgctcaacaggctgatgaacatgttgtagagcgacacgtacaggctaacggtggcgcgaatgtagttggtctcgccgccgtgaatgatgttgctggtttcccacaggatcgcgccggcggagaacaggatgaacagcgcgctgatagccaggtgcagagcagggatctgcaggaacaggttggcgatcaccgccaccagcagcaccacaaaaccggccatcatcatgccggacaggaacgacatgtctttacgggtggtcagcacatacgccgagcagcagaagaacactgcggcggtgccgcccagcgccagcatgatcagatcgcccgcgccggcgttcaggaacgaactgaggatcgggccgagggcgtatcccatgaaaccggtcagcgcgaaagccgccagaatgcccgccgggctgttggccagtttatgggtcaggaacatcaggccgtagaaaccgaccagcatcagcagcaagcctggtgcaggcagacccaacattgtactggcggtcgcggtcagggctgagaaagccagggtcagggataacaggaaataggtgttgcgcaggactttatgcgtgctgagcagcgagtcgcgcgaagaagatgagacgacaatgcggtccataatgctctctcttatcaggccatcacaaaataatcccgatgataggcagcgcaagggcttgattaaagtttgtttaccaatctttacccttagttatcattatggcaacagcggggtgggtgttcgtttgatcgccgcttgctttgcctgcggcgatttttcgcgcggttgaacgcgttcgggctttacaagcgaataaggtctgtttatagtgcgcgtcgttgcggaggggtggccgagtggctgaaggcaacggtcttgaaaaccgtcgacgggaaaccgttccagagttcgaatctctgctcctccgccatacattctgaccccgtgctctctgagcacggggttttttgcttttgcgtgcggataaaccggggcgcttctgcaggaaacgcgatcggctattgataagggccatgcgtcggtgagattatgcacctatcaaggccggccgctcggatgcctgcagttgccaggcgttaccgttgcgacaagcaacgccgccttatcaatttcgcttaatgctcttatggagacagagatgaactggtatcaagtcgccttatggaccatgatttttctcaagtccggcgctttcctggtgttcgtatggtggtggatgttcaaacgtgcgaccaaaccctatgagcgtccgaaagacgtcgtggtggacgatacgccgtacgatgagaacctcaccatggaagaggtgatgaaaaaccatggcatcgtccgcacggatatgtcggtaaaatagtcctcccgcctccccaaccgttatctggggcgtgtttgccaagagcgcgcccccttgtgtttcttcgctgtctctttatggcattctgctttcacgttaacggcataacgtgaccgggaaaagcacgccatgaacgatgtacgcatcctgtcgcactttacgcatcgaaaaaacgccgttcttaatgccgagagagatcatggggatttctttggtcagctcatccggcgcgttatcgtcgggggctttgctgatttctcggtgggtggtcatgtaaaacccgtgatccaacctctttatatcaaagtttatttttctatccaggctgtaggtttttcctcccacggtaatgtccccacgttgaacgatcatggcgcgatgctcgtcatagatgaataaactgcccgtcacttttagttccaggtcatcgcctgaagctaatcgtttttttgtgatcgtatcggcttggcaattcatatgtacaggtgcgtcgggtgtgaaaacgcgaagcaggacaatgaagagaatcactgccaaaaatccgataatcagtatttttgggttgcgcaatgcggccatttattttccattgagaattttgtaggtaacacactgggtatatcgaccttgcgagccgagatagcatacaccgaggaaggtgttataaatcaacgtatgtttttcggaggaaaaatagatatccgccttactggctagacaatccacaccgctgccttctaatgcctggttgaccatgcgcttttccagttcgtcatcaatatgtttatctgcatccagagaatataaggtgcaattttctttttttcctaacgcaactaaattctcccgaggttgatcagcaggttcgataggataaagcgtcgctacgatcaacagaggaataaatacgcagcagacagtggcaacagcgctaacctttacctttttctgcggcggcaccaggtgtggttcggcaacaggtgccaggggcgaaagcggctctgaagcataagaaggcggcgtttcgctgacggttacctgcggtggcggataaatttcaatcatagcggtgaaacaaaacccgactttcgccagggtttttattggggaggtctctctacccagaagcttgaatgctttccttatttcactgacggctacatttagactgatcgatgagcctgaaaaaccatactcttcccataccttttttatcaacatctcacgtttcaatgggatattggggtgagtcagcatttcaattaacaggcgtgaagccgggttggatatccgtatcgatgactcatcattatcaatgagttggagacgacacgcgtttgcgtcatagatcacgcagaggtcgataatatatttcatgtattcaggtttttataatgatataggcttccagttcgcggctagtatttagtgaaacttcgggtaggtcaaggttctgggcggaaaacataaataatcaaggacgtttttttattttctcggcgaacggaaaacgcagtcctttgccgttttttatgtcatttttggagttaaattctaaaaaaattagtttttacagattataataattaaaatttaggttaataaaaataatgttcctgtcgttaatgatttgatgcagaattatcttagtgtttacggcgcttgtttatgtgccaatcgcttattgtttgctcccgaacggcaatgtgagttttccaaggaaaagacaggtatttagtgcaaagtatcgacgttgtctttggccatggatggaggaagtatgctcagtatcggtatcgtatctgaaaacattttcttcagagaggcgataaaaagaatattgatgccaaggatttttcataaagatcacgttattgcctactatgacgatctgcctttggctatggggcgaaattgccacgatattctgatcgtcgatgatgcggtaaaaagcatgttgcgtttcagtatggctgtcgcgttattggctgctattcatggtgtaaagatttttttgacgacggaagagaagcgccgtctgttatttcgttctgtctcgcatgatgtcgtcgtgctcgataaaaaaggcagtgtccccggcatcagtaaagagctgtcttttctgatggataatatctcgcagcgccctgcattgaatggaggcgttgcgagtggagtgggccgccatacgaaaagttgtctgacggaaagtgaagtggaaacgctccatttgctttccttcggctatacggtgactcaggtttccaagattcttgataaaagcgtaaaaacggtcagtacgcagaaatgcagtgcattacgcaaaatgggattgaagaatcgggtgcacaacttactggaaatctcatccggtttctcggaggttccctagagattcgttattttcatcgtttttattgtcgggtgattaataacgctattgcttgattttataaaaacaggaatgtgttcatccttttgcctctgtattacggggaggggtttctttatcccgccggcagcggctgatttttatttattctcttaaaccaaactgttatggagttttatctcatgatgaagaagatgttttctgttgcaatcatggcggctgcggtcgctgcgccaacggcttttgctgaagacaattccgccggtggcatcattaactttaccggtgccattaccgacaccacctgtacgattaacggcggaaaaagcgcggatttcaccgttgcgctgagcccgatctcggtgaccgacgcgggtaacgccgttgggccaatcaccaagaacaagaagtccttctcgctgaccttctccggctgttcgccggcggccggcactgcaggcaccccgctgaaaatctacttctcctccgcggataacatctccaccgacggcaaatatttgctgaacaactcggtcaacgagaacgacgcttccgttgcgaagaacgtgggcttctctctggctgaaaccggttcttccaccccgatccagctgaacgtgccttatgtcaccgacatcatgggcgataaagcggcaccggattcagaaaccctgacgctggacgcgtactactacaaaaccaacgctgaagcggcaaaagtgggcgctctgagctccaacgtgacttacaccatttcttacctgtaatcgcgctgaaagccaggcccttgatgggcctggccacccgggggaacgatgaaaaaatatatgatgatagcggcgctgttgctcggttccgttggcgcgcaggccaatgtggtggttaacggtacgcgggtgatctacccggcaaacaacaaggatgtgattgtccaactgctgaataacggtgccgatccctcactggttcaggcctggatcgacgacggcgacatcaattccaccccggaaaccgccaacgtaccgtttttgctatcgccaccggtggtgaaagtgaacggcaacagcgggcagcagctgcgcattcagaaagtcggcgccgcgttggcggcggatcgtgaatcggtgttctatctcaacgtgctggatatcccgccgacgccggaaaacctgcagggtaccaatacgctgcagctggcgatcaaatcgcgcatcaagctgttctaccgcccgcaggccttaacccgcggcgtagaaaacgcattggaaaaactgacgctgcaagccaatggcaaggggttcaacgtcatcaacaacagcccgtatttcatcacggtagcgaatatcggccagggtgaggacaagcatctgctggttgattcgctgatggttgcgccgttttccactcagtttgctgccagcaaacgatcggtcagtaaaaacgcgcgttatgacctgatgtatatcgacgatctgggggcttacaagtctaaagccatcaccgcacactaacctgaaagaacaacaatgaagctgaataaaaaagtcctctcgctgctgaccgcctcttcattcttgttgccggatacggcctgggcggtgacgttcgatacttcgctgttggccggcgaatcgcgcgattccgatctttcgcgtttttacctcaacaatgatatgcctgccggccggcaggagatcgatgtgtatgtcaatcatgactggaaagggcgctacgcgctgctgtttggcacgcaacgcgacgatattcaaattgcctaccaggatgcacagcggttgggcatcgatctgagtcaattgccgacacctcaggcgccccagacgacgctgtcgatcgcctcgctggtacagggcgggcggttcgatatggacgtcggcgcgttgagcctgcggttgacggttccgcaggcgcgggtcaaccgatcggaagcagggtacgtggatccggctttctggaatcgtggcatctccgcgttgacgctggcctacaacgcgacctactaccacgccgaggcgcgtggcgaaggcaatcacagcaataatgacgatttttataccgggctggagtccgggatcaatctggccggctggcaatttcgcgacagcagcagctttcgccacggcagcgggcgggggagccagtggcaaaacaacacgcgttatcttcagcgcgggttcgccgacatcaaatccaacctgaccgccggtgatttttattcgccgggggagctgtttgactcggtacgcattcgcggggtggcgctggcgtcggatatcagcatgcggcccaactcgcagcagggtttttcaccgattgtgcgtggcgtggcgcaatccaacgccctggtgaaagtggtgcagaacggcaacgtgatctaccaggaaaacgtgccgccgggcgcctttaccctcgacagcattcagccgaccggttcggcgggcgatctgtgggtgacggtcaaagaggctgacgggcgcgagcagtcgttcagcgtgccgttttcagccgtacccaacatgttgaaacagggtgtcagccaatacagcgtactggccggcaaggtaaacgaaagcaataccgattacgaacccggctttgtacagggcaccctgcagtacggtttcaacaatctggtaacgggttatgccggcagcattttgagcgacgactatcaggcctggctgctcggcagcggctggaacctgccgataggggcggtgtccattgatctgacacatgccgatactcgcctgaaaaaccgccgtgaaagcgggcagagcttccgtatcgcctacagtaaatttctcgatgtcaccgcgaccaacttcacgctggctgcctatcgctattccacccgcggttactacagctttaccgacgccatttactccaatgacggctatcgccagctggagcgtcagtttgatcgctggcgcgacgaggagggcgtgtccgaactggatatgaacacctgggatgcgctgcgttcggctcggccgaaaaatacctttacgctcaacctgaaccagcgtcttaacgaaggatggggcacgctgttcttctccggctcccagcgtgattactggacggccaatgcgaaaagccgcgaataccagctggggtactccaacaatctggggcgcgtcagctactccgtttccgccagccgggtgcgcaatagccagcgtgaggaagagacgcgctattacctgtcgttcagcctgccgctgtcggtgttcgataacaacgcctacctcagcaccggcctgtctgcgacagactcccactatcagcaaagcacggtcagcctgagcggcaatgcgctggagtccaaccgcctgagctactcgctgagcggcagcaatcgcagcggcggtgacaatatggccagcgtcaatgcggcctatcgcgcccgcgcctcgacgctgggcgtctcctacagcgaaggcaacgattatcgtcagagcggcctcagcgcgcgcggcagcctggtggcgatcccctggcatctgctggcgtcgaacgagatcggcaacaccatgacggtggtcgaggcgccgcaggccgaagggctgatggtcaacggcgacgaaagcatcgtgaccaatgcgcagggtttggcgctggtgccttatgccacgccgtaccggcaaaactcggtcacgctatcggataccggccacagcagcggggcggaaatcagcggcaacgtcgccaaccatgtgccttactacggcgcggtcagctacctgaaattcgagaccgatcaacgtcggccattccagctgcgtgcgcagcgcgccgatggtgcaccgctgccgttcggcgccgaagtgatggatgaaaacgatcggtcggtaggttttgtcggccaggccagcgtgttgtacctgcgcgccgaacagccgccaacggcgttgacggtgcaattgcgcgacggcagttgccacatcgccaaaccgaatctggcgctggatgcgtcgcccggcgtttgccgctaatacaggataaccgaatctatgatcaggctgatttttttgctgctgctgtccgggttgttcagcggctatagctatgcttcctgctatggcaagggcattgagtacgcccctgcgctatttgtagacctttctgacaaactgagcgccgctaacccggtctgggaataccagacgtctacccaatatagcgggactttccgatgttcaggccgcaaattcgaattttcctatacgccggtgctgtcaccgaaagataaatatgccacctatatcggtttcaatgatggcaagcagtgggtacgcgctgaaatcaccaatgacatcaagaatattacgttaagaggggcgggaagccattcggccagcgaactgaatacaatgatgacggtgcgattttcgctggtgcaaaaacccaaagacgggttgttggtcaatggcgatagctatccgtttgaagacgtgctgttcgtcagtgatatgagcggtatgtcattgggagagatccttggctggccgttaaaaatgttgagcaaactcctgtcgtggatcgcgagcggttttcgaaaatggccttatgacgaccgtgatatgtacggtcaaccgatgacggtgaggtacgcgccgaaaaccaccacctgtcatttcgacaatgccggcctgacggtcaggttgcccaaaatgggcgtggcgcaggtgctgaataacaatcaacccggctacacgccgttctcgctgaacatcagctgccagaacatgcagcaggaaggcatcgcggatcgcgccgttgagatgttcctgtccagcaataacctgctggcctctgacgccagcgtgttgaccaatgccaatgcgggcggtgcgcaaggggtggggctgcgcctggtcaagcgcgacatgccgagctcgccggtggtattgtcaccttccaacgtcgatcgcggcagcgccacctcactgtttcacgtcgccgccggcggcagcctgaacagtcatttcatcatcggcatgggcgcttattattacccttatcagcgcgatggcgtgacgcagggggaactcaacacctcggccacgttgaacatcatctatccctgagaggttcgggagaaccggtgcgcaacctgtttcgttcaccggtgttccgtcgggtgttcgaaaatatgtgcgccggcgccctgttggccaaaaatatcgtttgggttgcgcagcgggcagtcggcgagcgacaggcagccgcagccgatgcagctgtcgagatggtcgcgcagcatggtcagtctttgaatgcgctcatccagcgttttgcgccaggcggaggacaacacgccccattgctccgaggtcagcttgctgccggcgggaaagcggcccagcgtggcgcggatctcctccagcggaatgcccgcgctttgcgcgatcttgatcaccgcgatgtagcgcaacaccaccggcgtgtagcggcgctggttaccggcgttgcgcgtcgcctgaatcaaccccttgctttcgtaaaagtgcaacgcggataccgccacgccgctgcgcttcgccacttccccaacggtcaatagccgataggtgttaatcggttcatttcttgccattccacattcctcggcttgacctcaagttaacctgaggttttatagtgcagccagccgggcttggcaaccggcatctttcgtcacttgcctgcgctgcgtcgggggaagggtggctttggctgtaaaatcaggaagaaaccgttacatgatgaaacgatacctcattattgccgcgctgctggcggcgctcgccgtcgctgcggtagcgatgcgatccaccgcgcggcaaagcgaaggcgcgccggcctatccgccggtgaaagtggcgctggcgcccgcactgcgtgaacaggcggcgcgcagttacgccggcgtaggcgagctggaggcggccagccaggtggaagtggcggcagagaccagcggccgcatcacgcgcatcctgttcgaatccggccaaacggtacggcaggggcaactgctggtgcagctcaacgatgcggtcgagcaggctgagctggtgcgcctgcaggcgcagctgcgcaatgccgatctgctgctggcgcgcatgcgcaagctgatgaacctcaacgccaccgcgcggcagcagttggacgatgcgctggctgaacgggatatggcgctcggtgcggtgcaggaaacgcaggccaaaatcgcgcaaaaggcgatccgcgcgccgttctccggcgtcatcggcattcgtcgcgtgcatgaagggcaatacctcaacgccgccgaggcggtggccaacctggtggacgccgatacgctgcgggtcaatttctcgctggacgaacaaagcagcgccgggttggcgctgagccaggcggtatcggtgcaggtcggcgcctatcccgagcgcgctttccccgccgctattaccgctatcgatccgatgatcggcaaatctcgcaccgtacaggtgcaggcgacgttgactaaccgccagagattgctgaaggccggcatgtacgccggcattcgcgtcacgcagcagcagcgcgtggcggtgctgacggtgccggaaacggcgctgacctatacggcgtacggcgacaccgtgttcgtcgcgcagcagggtgaaaagggcatgacggtcaagcgcgtctcggtcaccgtgggtgagcgcaacgacgggcgcgtcgagatcgtcagcggcctgcaggaaggcgaccgggtggtgacttcgggccagctcaagctgagcgacggcatggcggccgagccggtagcgcaggatgctctgaacgccgcccaggccggttcctgaggagagaccgatgacatttaccgatctgttcgtgcgccggccggtgctggcgctggtggtcagcaccttgattctgctgttcggcgcgctggcgctcagcaaactgccgatccgccaatacccgctgctggaaaactctaccatcaccatcagcaccgactatcccggcgcgtcgtccgagctgatgcagggctttgttacgcagccgatcgcccaggcggtgtcctccgtcgagggcgttgactacctttcttcctcctcggtgcaggggcgcagcgtggtgacggtgcgcatggcgctgaaccgcgactccacccaggcgctgaccgaagtgatggccaaggtcaaccaggtgcgctataagctgccggagcaggcttacgatccggtgattgagcgttccgccggtgaagccaccgccgtggcctatgtcggtttttccagtaaaacgctgtccacgccggcgctgagcgaatacctgacgcgggtggtggaaccgatgtttaccaccatcgacggcgtcgccaaggttgaagtgttcggcgggcaaaaaatggcgatgcgcctgtggctggacagcgatcggctggccggccgcggtctgaccgctgccgacgtggccgatgcggtgcggcgcaacaactaccaggcggcaccgggcaaggtgaaagggcagtatgtggttgccaacgtgcgggtgaataccgatctcaccagcgtagaggagtttcgcaatctggtggtgcgcaacgacggcaacggtctggtgcgcttgaaagacgtcggcaccgtggagctgggcgccgcagccacggaaaccagcgccttgatggatggcgaaccggcggtgttccttggcgtcttccctacgccgaccggcaacccgctggtgatcgtcgacggcattcgccacctgatgccggcgatcgacaagatgcagccgccgggcgtgaagatggcgctggcgttcgagaccgcgcgctttattcaggcctcgatcgatgaagtggtacataccctgctcgaagcgctggcgatcgttgtggcggtgatctacctgtgtctgggatcgctgcgcaccgtgctgatcccggtggtgaccattcccttgtcgattctcggcgccgccgggctgatgctggccttcggcttcagcgtcaatttgctgacgctgctggcgatggtcctggcgatcggtttggtggtggacgacgccatcgtggtggtggagaacgtgcatcgccatatcgaagaggggaaaacgccgctggcggcggcgatgatcggcgcacgcgaggtggccgggccggtgatcgccatgaccctgacgctggccgcggtctatgcgccgatcggcctgatgggcgggctgaccggcgcgctgtttcgcgaattcgcgctgacgctggccggggcggtggtggtgtccggcgtggtggcgctgacgctgtcgccggtgatgagttcactcctgctgccggccaaacagagcgaagggcgcgtggcgcacgccgccgagtggttcttcggcggcctgacgcggcgctatgcgcgcgcgctggatttctcgctgcatcaccgttggctgaccggtacgctggcgctgctggtgatgatcagcctgccgctattgtacctgatgccgcagcgcgagctggcgccgaccgaggatcaggccatcgtactgaccgccatcaaggcgccgcagcaggccaacctgaactatgtcgaacgctttgcctacaagctggacgaggtttacaaccgcatgccggaaaccgaaagccgctggatcatcaacggcagcgacggcacggcgtccggcatcggcggcatcaacctgacgctgtggcaggcgcgccagcgctcggcgtcggcggtgcaggccgatctgcaacgggcggtgaacgatgttgaaggcaccagcattttcgccttccagctgcccgccttgccaggctccaccggggggctgccggtgcagatggtgctgcgtacgccgcaggactacccgcagctgtaccgcaccctggaggaggtgaaacagaacgccagaaacagcggcctgtttatggtggtggacagcgatttggactacaacaacccgctggcggaggtgcacatcgatcgcgccaaggccaacagtctggggatacgcatgagcgacatcggtgaatcgttggcggtgttggtgggagaaaactacctcaaccgcttcgggatggacgggcgcgcttatgacgttatcccgcaaagcctgcgcgaacaacggctgacgccgcaggcgctggcgcggcaatatgttcgcgcccaggacaatacgctggtgccgctctccaccgtggtatcggtggccgttaaggtcgaaccgaacaagctgacccagttcaaccagcagaacgccgccaccctgcaggcgattcccgcgcccggcgtttcgatgggcgaagcggtggctttcctcgaacggcaggccaatgcgctgccggccgaatttagccacgactggcagggggattcgcgccaatacacccaggagggcagcgcgctggcgttcgcgttcctggcggcgttggtgatcatttacctggtgctggcggcgcagtacgagagcctgaaagatccgctgattatcctcatcaccgtgccgctgtcgatctgcggcgccttgctgccgctggcgctgggctacgccacgatgaatatctatacccaggtcggtctggtgaccctgatcgggctcatcagcaagcacggcattctgatggtggagttcgccaacgagctgcagatgcatcaggggctgacgcggcgcgccgcgattttgcaggcggcgcaaattcgtctgcggccggttctgatgaccaccggggcgatggtgttcggtttgatcccgctgctgttcgccagcggcgccggggctgccagtcgcttcggcctggggctggtgatcgtctccggcatgctggtgggcacgctgtttaccctgtttgtgttgccgacggtgtatacgctgttggcgcgtgatcacgcggtagcctcacctcgtcagcgtgagttggccgccgcgcaaaaggcgctgacggaataatccgccggcgcccgcgtgaagaataaacccgcttcggcgggttttttcgtcagtttttgcagcccatcaactccggcagaacgccgggtttgctcttcagcgaagcctgcacgtcgtccggcagaccggcccagatgatcaggccggtgcgtttctcgatctcgtccaccgtcacgcggaattggcagaaatcggcgcccttcggcgtgttctggtcgaacaggaaggcggcatagtggttcaccgccgggctgttgttgatgaaaatcaccttccagtaggcgctggggatggtgtgcgctttctgggtgcccggcagtttgcccatatcgcgctcatacagcggcccggtcacggtatagaccgaggagatatcggcgcgatcgatcagcttgcgttcctgatcttccagccgcgcccaggcgccctggttcagatcggacttttgcggcgtgatgttggacaggtagttcaacgattcccagtcggagacgcccgccagcgaggccagcggcgcctgatgaccgcgatcgaccttcagcgcggcgttggcgccggtgtaatcggcgggcgccaacgtgtccgccgggttgagcgccggatcggttttccagttgcgcgtcttgccgctggccggcgtgtctttggtgatgtgataggccacccagttggcgaacttggtggtgctgttgttgttcaacgtataagcatgacgcacgatagacacgttgctgctgccgccggtcgggcagccgaccgcgcagttgtcgatggattcgagcgtgtcggccgacgcctgcgcggcgaacagcagggcggccaaggccaacatcttgttgttaaagcgcatattcatatcctcaataagttaaaaaaaatactgtatatatttacagtaaattaaacttatcgcagtgaaacgaatacaacaatgcaacatattcatgttgtgaatgtgtcagtcatggtacagccaggccacacgttaaatacggcggaaataaaaacggcgtccaacagacgccgtttcaaagggggttattccagcaggtcgttgaccgtgcggcgaacgtagtgcgtcatctgcgccagatcgcccggtgacaccgggccgccgccggcgcgcaccacttgctgttcgatctgggcgatttcctgttcgaccttgttggcgatctgcactttgactatcttgtccaccgaagacagcagcaccttcaagacgacttttagcgcgatgttttcgcagaacgagtcgtagtgatgaaccggcggcggcggggccggagccggctcgggcgcgcgcggagccagagccttgaagctgtctacattttcaataataagatccatgtctcttattagttcatcaaaatctttagacactgacttattcccttcgctgtgcgcaaaaaacagaacgcccgtcctcgggctgaaagcggatgagcgacgggcagaacgaattcgggcctggccttcagacgttgaatggccgggggaggggcattctaaccttgcggcgggtcggcaacaagatggggccgtgcgaatgcgcggccctttggatcacgaggctggagggcgcttaacttttcagcttggcggtgattttggccacgtgttcgccctgataacgggcaatggtcagctcttcgttgctcggctgccgcgaaccgtcggcgccggcgatggtggtggcgccatacggggtgccgccgcgcacctgtgaaacgtcaaacagctcctgcgtcgcatagccgatcggcacgatgatgaaaccgtggtgtgccagcgtggtccaggtcgaactgatggtctgttcctggccaccgccggtgccggtggaggagaagacgctgcctaccttgccgtacagcgcgccggaagcccacaggccgccggtctgatcgaggaaggtgcgcatttgcccggccatattgccgaagcgggtcggcgtgccgaaaataatgccgtcatagtccgccagctcttgcggggtggcgaccggcgcctgctggtgttgcttgcccccggccttggcgaaggcttccggcgtcatggtttccggcacgcgtttgaccgtcacgtctacgttatcgacccgattcgccccttcggccaccgcctgcgccaggcgttcgatgtggccgtacattgagtaataaagcaccaacagtttcgtcatgttccgtactcccgctcagatgattaacaaaaacccctgataagcatagaagcgaatgacgaacttggcgttacgacgttacctgatgccggcgatcgccagcagggcgccaaaggcgatcagcagcccgccaaaggtacgatcgatgccgcggcgcaaacgcaaaaagcgcgcattgacgcccggtgcggaaaatagcagcgcgacggcggcaaaccagaagatatggacggcggcgataaaaagaccatagccgatttgcacgccgagcggggtgtgcggagaaaccacctgcatgaataggctgacgatgaagatggtggttttcgggtttaacgcgttggtgagaaagccggttttcaaggcggcgaaatcgctgatggcggccggcgctgttgtgggggctgcatcatggtgcgccgcgttgcgcagcagcgtaacgccgaggtagatcaggtaggtggcgccgatggctttaagcaggttaaacaaccagggcgactgttgaatcaatacgccgacgccaatcagcgtatagctgacatggaccagcaccccggcgccaatgccgcaggcggtcaagacgccggcgcggcgcgaaagcaacaggctattgcgcgagaccatggcaaagtccggccccgggcttatcacggcgagtaaagtaatggtgacgacagcgatgagttcagtcatagttatccttgcgatttttatcaatagagtgactgatttataagagtaatttttctcggtgacaaacgatgaatagtgacagtatcggtgagaaaaactcacgcaaaaccggcaggccgttgccgttgggcgggctgcgttgcttcgaggccgccgcgcggctggaaagttttacgcaggcggcgcaggggctgaatttgacgcacggcgccgtcagccgggcggtgcgggcgctggaagaggaactgggcgtggcattgtttgagcgccgccatcggcgggttctgctcacggcggcggggcgcaagctgtttcaggcgacgcagcaggccttcggcattctggatcataccgcgctggaactgcgccagcaggcgctcgacgcgccgctggtcttgtcctgtgaaccgaccttgttgatgcgttggctgatcccgcgcctgccggcttttcagcaggcgcacccggatatcaacttacagctggtggccggtggcgggccgttttcgttccatgacggcattacggcggcgatcaggcgcaatgacttcgattggggaaagcaggtgcatagcctggcgctgttcagtgaaaaggttgggccggtgtgccaacccgaggcgttggcaaggatgacgatcgccgagggcagcctgcggagtttgcggcccggcactaaactgctgcattccgccacccggccggatgcctggcggcactgggcgcagcagcaggggatgacgttggcaggacattcggagcagcgctttgatcatttctatttcagcctgcaggcggcggtcgccggtcttggcatcgcgatcggcccgtggttgcaagtgcgagacgatctggccgccggtttgttgagtgcgccgttcggttttacgcccgacggcagcggctattacctgctgtcgccgcaggcgatcgtgccgggcagcgcgttggcccggctggccgagtggctaacgctcacggcagacgcctgagtttttgcgccagccgctgttcctgccagcggctgaagacgttgcgcagcagcagagtgcgcaccgcccgcatgaccagcgcgaggctcatgccgccgatcgcccacagcgaccagagatagtgcgggtgggtaaaccaattaatggcgaacaacatcacgccaatcacggcgaaacgcaccgccatgctcagcagtttgccttctgccgcgacctggctacgaaggcgctgttcgtcaggctcctcctcctccattgtctgttgcggctgtgcgttgagatcgcggacctgcacgcccagcgcggcggcgattgcggtcaaggtttccaggctggcctgttcgccgttttcaatccgctgtacggtgcgggtgctgacgccggcgatggtcgccaactgctcctgcgaccagcctttttccagacgtaacggcctgatgcggtacttttgcatgatgcactcccgagttcgctgtcactgtcatccagtgtaggaggcgcggggtggcggcgccacgacagcggcacgacagcggcacgacatccgccgccggcgcgggctggcgggcagtcagaaggcgacgttgcgaataaagcgcagcgggagatcgccgtggttggcgtaagcgtaacgttgatcgctgttgaaagtttgcgcggcgccggcggaaagggtcagcgtgccttgttccagttccagcgtcagggtgccggcaatcacatagatcatctcgctccagccttcggcgtccggcgccgagtcatagcgctcgcccggcatcagcgtccattcccacagctcggcccgttggcgcgccggcacgctggcggcgaacagcgcctggctgcccggctgtgcgccttgccaggccagttcccctaccagatggctgccgcgcgcttccggcgcctggatcagatcggtaaaggaaatcgccagggcggcggcaatcttgtcgagcaccgccaggctgacgttgcgatcgccggcctcgatgcccgccagcatgcggcggctgacgccggaaagttcggccagcgccatctggctcaggcccgcctgttggcggtagccgcgcagattgctgctcaggtactgcagcactttggggggatcggttttcgcgttatgcgccgtattgctcatcgccggactttatctcatactggcaggatctgtgcattatattgcactcagcaggaagggcaagccggtgtcagcagcaaaaaaatcctttatttccgccgtggttccgcagatcaggctgccggaagcggtgttgattttcatcaccatgatctggggcggcacctttttggcggtgcaccacgcgatgcaagtcagcgggccgttcttttttgtcggcctgcgtttcgccaccgccacgctggcgttgacgttgttttcgctgcgcgtgctgcgcggcctgaccctgtatgaactgaaggcgggcgtgctgatcgggctggcgatcatgttcggctatagcatgcaaaccgtcggcctgcagaccatcaccagcagccagtcggcgttcatcaccgccatgtatgtgccgatcgtgccgctgttgcaatggctggtgctggggcggttccccggcatcatgtcgtggatcggtattctgctggcctttaccggcctgatgctgctggcggcgccgagcagcaccgacatgacgctgagcctcggcgaaattctgacgctggccggcacgctgggcatggcggcagagatcatcctcatcggcgctttcgccggcaaggtgaatatccgccgggtgaccatcgtgcagctggcgaccgcctcgctggcctcgtttttgatgatggcgccgaccggcgagtcgccgccgccgtattcggattacctgctgtacagcgccatagggctggggctggccagcgcgttgattcagctgaccatgaactgggcgcagcgcagcgtttcacccacgcgcgctacggtgatctacgccggtgaaccggtctgggcgggcatcgtcgggcggctcgccggtgagcgtttaccgggcgtggcgctattggggggcgcgttgatcgtgattggggtggtggtcagcgagctgcgcgtgcgacgcaaggataaagcggcggtggcgacggaggcggattagcgcagaggcgtaaaaagaaaggggcggagagatccgcccctttttgcatcacgcgattttcttcttgcgcaggaacacgtaagacaggccgagcacgatgaaccacagcggagtgacgatcagcgcctgacgggtgtcttcgcgcagcgacagcagcaccagcacgaacacgaagaacgccatgcacacccagcacatcagtttgccggcaggcattttgtagatcgatttctggtgcagcgccgggcgctgtttacggtagaccaggtacgaacacaggatgatggtccagacgaacatgaacagaattgccgacacggtagtcaccagggtgaagaccgtcatcacgttcgggatcaggtaaatcagcaccacgccgcccagcaggcagatacaggagaaggtgaggccgttggccggcaccgcgcgcttggacaggttggcgaacgatttcggcgcgtcgccttcctgcgccagcccgaacagcatgcggctggtggagaacacgccgctgttggcggaggaggcggcggaggtcagcaccacgaagttgattacgctggccgcggccggcaggccgatcagcacgaacagttcaacgaacgggctcttgtcaggcaccacggagttccatggcgttaccgacatgatgacgatcagggcgaacacgtagaacatgatgatgcggatcggaatcgagttgatggcgcgcggcaacgacttctccggatccttggtttccgcggcggtggtgcccaccagttcaatgccgacgaaggcgaataccgcgatctggaagccggcgaagaagccgctgatgcctttcgggaacatgccgccgtcattccacagatgggtgaatgaggccacggtgccggtcggcgactggaactgcatggcgatcatcaccagcccggcgacaatcagcccgacgatggcgacgattttaatcatcgcaaaccaaaactccatttcgccgaacatcttcaccgtcgccagattaaggccgagcagcaacagcacgcacagcagtgaagcgatccactgggagagtcccgggaaccagaactgggcgtaggcggtgatcgccacgacgtcggcaatgccggtgaccacccagcagaaccagtaggtccaaccggtgaagaaaccggcccacgggccgagcagatccgcggcgaaatcgctgaacgatttgtactccaggttggacagcagcagctcgcccatggcgcgcatcacgaagaacagcataaagccgatgatcatgtacacgaagatgatcgaggggccggccaggctgatggttttaccggaacccataaacaggccggtgccgatggcgccgccgatggcgatcagttgaatatgtcggttagtgaggtttcgccgtagatgatcttctgaagcgggcgtcgcgtcagtcgctattttagagtgatctaccatctgatgatgtcctgttttacctgtcattagtgaagtcgcgagctctgaagtggctcttttttatacatttatccggttgatccggctttagtaaggtagtgcaataacgccacctttgtgcaacatgtttacaacatttatacgcgggataaaagtcgatcaatctttacacgagaggaggcaaatcggacgttcagggagcggaagattactcttcaaacggtgggattaacagaccttatgcggcttatctcgttgattaaacaaagggttgtaaaattcgcatgagaaaaagtaatgggtgtaagcgtttgacagcgcctccgacgaggaggacaatttaccgcgttgggtcgttagctcagtcggtagagcagttgactcttaatcaattggtcacaggttcgaaccctgtacgacccaccaaccaaatcagcgtgttacgcttagacttttcttcgtttcttcccgcattgcgccgttttaagcgcgcattctgcaaaaaaattcgcatttttcgactgatgttcagaaaggtgatctggcgcaaactgcaatgttgcaccgtactttatacggcaagggaggctgtgcgctggcgcaacgtcggcgtaggggcgggccatttgcccaagaatctttcaggtcaggaaacggggaataaatgcgccgtcgacatcaaaagcagcgcccagacggcggccgagagcgcggcggtggcatagacgcgccgcgccggcagttgcaacatgccggccatcagcggcacggtgtaacgcatcaccgccagaaaacgcgaggcgaacagcagcggcagcccgcgcttttgcaaggaacgttgcgctttgcgcagcggggcgtggaagcgtgccggcagccggcggccaagatcgcgacggcacagcagcgcgccgaagtggaaagacaggatcgagcccaacgcggcgccgagggcgatggccgcccaaactgcgccgaagggcagcgcgtgcttgcccgccacgatgcccatcagcagcgtcaccgaggcgggcggcagggcggaagacaccacgatcacggattttcccagcgcgaacaggaaaatcagcagcagcaacatctccggttccggactgtatttggcgataatgtgcgtcaattcatccatttaacacctgcgggcgagagggctgagtgccagtgtcccatccgcaggttcaataagggttaaataacgcgccgctatccggcgatctccgcgtcttgcttgctcacgtcggtgcgccggtttctgagcgcccacaacagcgtggcgcacagcagtgaaaaggcggccagcaccaacggcccggcatgcgggctgtgaaaacgctgttccgcctcggtgcggatcagcggggctaaaaagctgaatgcggcgccaagcgtggtgcaaaaaccgatgccggccgccagcgccgggccggtcagcacctgggcgggaaacgtccagaaaatcggctgtaccgccagaaaactcactgcgcaacagctcagggcgacgatggcgagcaaagggccggcataggaagacaccaccaaacccagcgctgccgcgaccatgcagccgacggcgatcggtaatcgtctggcggtttttctgtcggcatagcgcggcaggaaatagacgcccagcgcggagaacgcccagggaatggcggccaccagcgaggccttgaagccaagatgggtgcccatcagcgaggcgacctgcgacggcaggaaaaacatcaggccgtatacgccgatctgcagggtgccgtagatcaacgccagatgccaaactttgccgctgctcatcgccgctttgacgctgctggtttcggtctgctgctgttcatcggccaattgtgccaccagcgccgtgcgttcttcctcgctcagaaagcgcgcctgccgtggattatcgtcgagatagaaaaaggcgaaaacgccgaggacgacggccggcaatccttccagcacaaacatccagaaccagccgggtttacccaacacgccgtgcatctccagcaatgcccccgatagcggtgaaccgagcgtcagcgccgccggcacgccgagcacgaaaatgccaatcaccgaggcgcgcaccttattgggaaaatagatcgacgccagcagcaggatgccggggtaaaagccggcttcggcgatccccagcagaaaccgcaggacgataaattgctgttcattggtcaccagcccggtgcaggccgacagcgccccccacagcgcggtggtggcgctgagccagcgtttggcgccccagcggttcatcagcaggttggccgggatgccgaacagcgcataggcggcaaaaaatatcccggcgcccagggcaaaggcggattgcgacagcgcgatatcgatggccattgcgtccttggcaaagccgacgttaaccctgtcgataaaggcgatgaagtacatggcgaacatcaagggcaccagtctgcgccaggttttgcgaatggcggcgttgagcgcaggagcggcataggtggcgtgattcactggcggtaacctctcttctgagaatgacaagcgtcggtcataaggaccgtcctggcgccgttgccctcaacacgacggtaacagcggacctttttcgcaaaccctaaaggtctaatggtcaggccttttggggtgaaaaaaatgccgcgtatcgggtcggcagattgatgcagacatcaccatggtgaatggtatgttgcttttttgttaatcagacgttcacacagggccagggcgcgttcaagcgctttgatcgagatctgtgtgcgctatcaccgaattggcaacccggtgttagagctggagagtggcgctttcatctcgcgagggaggacgataaggtgaggcacggcaaaacagaatgcaggagcgcaacatgctgaaggtcatcgctgaagattttatccacccggaacacattgacaccgttatgccgtggtatcgcgagctggtggagaaaacccgtcaagagccgctgtgcatcagctatgaactgtgcatcgaccagcaggatcccgggcattttatttttatcgaaagctggccggatcgcgctgccctggatgtgcattgtcagaccgagcatttcacccggctggtgccgcagatcaaccactatcagcgcaagccttgtaccttcctgtttatgcaggcatttcctgaaacaggcgataaataggcgaaaaaatccccgcagggggcggggtcaatggcttctcattactatcttgttgtgtttaaaaaataggctgataatgattttcattctctaagaatgctcttaaataaatcagcttggtgaatgattcactgcctgcttttcgctggcggttttaatggcgcgcaacatacggcgccgtatcaacccgcttaccaggcgaatcgcataccaatagggggtaaaccgccgccggctggcgtcgtcggggcagaagatgcgcgtttccgtcaccagacgacagcgcccaccctcggaggggctcacgacataacccagcgccagtttggcgacgccgggctgcgcgaaagccagaaaccccgccccgtcggcgacctgctccaggccgtattcagcctgccaaaatcggccgatcaggccatagaccaacgcgctttcatcctgctcaagcaggcaaaagttatgcaggccaaacggcggcgggctgggtttatcgcgtggcatcaggcgcacgggcaattcgcgtagtgctatcatgctgcggaaaaagcgatcgtgcttgggatcataagcggccacggcctccaggatccgcgcctgcggtgcggtgatggcgatcgcatgccgctccgagaactggtattgcccaaggtatttattcaatagcgtcatgctttgcattctcccgccattcgttttgcagcagggcgaaaccgaattcgtcgccccacgcgcctttgaaaaacacgttttgccgccaacaggcctcacggcgaaagcccagcttactgaacaacgcggcggcgcgaagattacgcgcgtccaccacggcggtaatgcggtgtttcgccagcggcccgaacagcagggcgatgacggcgcttagcgcctcgcgcgcttgtccttgccgctgatgaaccggatcgaaggtcacgcccagttcagcctgacgcccttcatcgaaaaaatggaccgcgacatcgcccagcaacgcgccgtcttcgcggcgctcgaccgccagttgaaaccagctgtcgtcacggttgaattcgagctgccgttgctgtgcgaaaaaggcctgtgcctcggcggcgctgtagtcgctccagctttgatagcgcgccacgtctgggtggctgcggtaggcggtaaagtggggcagatcgtcggcggtgaacgggcgcaggatcagtctgggggtttgtagaggcaaatggcgcattgtttttccttatcagcgcattagggctaccggcagtgtagcccagcgccgacaggcaggctgtgtaaaatgagcggtggaggacaaacgggaaatgccggttcaggcgaaccggcaggggcattatcgacgggcggcagcctgacgcaagcgctcgaccgggccttgttgaaaatcgaatgagggggcttcttgccgcgccagcccctgacgcacgatggccttaaccgcctggctggcggcaagatcttttccggcgatctgttcggcgatgcgcaacgcttcttcccgggccgaacttgcgctgatgcgggaaatggcgccgtgtgacaacgcttcctgtgcgccgacggttctgccggtcagcagccagtcgagcgcgacatagggggaaatacgcgccggcaatcgcgcgcacccgccttgtgcggcgactaacccgagcccggtttcggggaagctgaagcgtgcgttctggccggcgacgatcagatcgcacgccagggccagctcaaatccgcccccgtacgcgatgccgtcaacggcggcgatgatcaccttggcgatctgtgcatggatcagcccgccaaacccctccggcgtgacgatgggcagttcaccctgatgaaaggcgttgatatccatgccggcggaaaataccgccggttgaccggccaggacgatcgctcgcaccgagtcatcgttatctgcctgccgcaggtaggtgcggatcagctcggccatctgcaggttgatggcgttctttttttccggccgattgagggtgatgaccgcaacctgcgcgccataacgttcgtaaagcaccggcggtgattcactcatcgctggcctccccgcggaaaaagatcagcgtcagcaatagggcgatggcgccgagcggcagcgaaaacagcggcaggtaataggccggcagcgcatagagcgccaggccgcccagcatgccgcctgccgcgatgccggcgtacagcaccgagctgttgagcgatacggtcagcgcgccaaagcgtttcgatagcgacaacaggtgatgctggatcggcaccagatacatccagccggtgataccccagaccagaaagatggccagcacccaccagggggaagtgacatagaaggccagcagaaacagggacagcgtctggatcgccacggaaaacagcagcacgaacttgctgccgagggcatcggttaacgcgccggaggcaaaattgccgatcaccgcgccaatgccgaataccagcagcgcgaggggcaggatcgcctgcgggccgaactgggtgtttttcagcaacacgctgacgtagctatagacgatgtgttccgagcaaacggcaaaaaaggtgatcagtagcgtggtcagcaccgccttttgccgcagcggggcgagccgctctttcagcgaatgcttgcccggcggcgcaatggcccgcagcgccagcgacaggcccagcagcgcaattgcccccagcagggcgatgaacaggaagatttctcgccagccgatcagtttggcgagaaaggtgccgaacggaataccgagcgcaatagccaacgtcatacccccatagacgatggaaatggccaggccgcggcgtttttccgccaccagccctaccgcagcggcggcggcctgcggcgtgtaacaggccgcccccaatgccgccagcactctgccgaacgagatctgcaggtagctggtggcccaggcgcaggccaggttgccggcgatgaacagcaccagcgccaactgcaggatatgcttgcggttgacgttgcccagcagccaggcggtgagaggggcgaacagcatataagccagcgcgaataccgatatcaactgccccgcttgcgcggggctgacggcaaaggtatcggaaatgtcgctgagcacgccggcgacgataaaggcgtcggtgccgatggcgaacgtgccggtcgccatcagacagagcgtgatcagatggccgttataatccgctaacttcatcccgccctccgcagatcgttcgccgcccagactcgtcccagcgccgccaggaaggtctccacgtcggcatgggagtgcgccgaggtcggcgtcacccgcagccgctcgctgcctgcgggcaccgtcggtgcattgaccggttgcacgtaaatatcgtgttcatcgagcagcactttactgatgtgtttgttgcggtgcggatcgccgaccagcagcggcaggatatggctgtccgccgacaccagagggatgccggcggcgcgcaggccggttttcaggtgatcgacgatcgccaacaggtgtttgcgttgggtgtcatgctcgaggttgtatttaaaactggccagcgcggcggccaccaccggcgccggcgacgaggtgctgaagacgaatgccggggcccaactgcgcaccgcctccaccaccgaacggggcgcggcgatatagccgcccgccgcaccgtaagatttgccgaacccgccctgaataatggtgattttatccagcaggcccagttgttcggcgtagcccagcccacgttcgccatagacgccggcggagtggatctcgtcgagataggtcagcgcctggtactgctccgccagcgccacgatctgcgccaggggggcgaagtcaccgtccatggaatacagcgactcgaaagcgatcagctttggccgcgccggatcggcggcctgcagcagctcggcgaggtgtgccacatcgttgtggcggaagatttttttctccgctttgctgtagcggataccgtaaatcatcgaggcgtgattcagctcgtcggagaacacgatcagatcgggaatggcgtcgcacagggtggataaggtggcgtcgttggcgccgaaaccggtggtgaacagcagcgccgactctttgccataggcgctggccagcagcgtttccagctcgctgtggtagaccgaggtgccggaaatgctgcgggcgccgcaggtgcccagcccgacccgattaaccgcatcggtggtggccagcagcactttggggtggtggctcatcgccagatagtcgttcgagcaccagacgttgagacggcgctcaccgtgatggccgtggctggtggcccagggtttgtcctgcacgccgcgttcaaggttgaggaactcgcgaaaacgcccctgttttttggtttccgccagcttttcttcaagaatgttcagtacgctcatcgtatgttccttgtgttaaacggctttaaggtttaatgacagcccctgaccgacgccgacgcacatcgtcaccaatgcgttgttcgcctgttggtcgcgtaattccagcgctgccgacagcaccaggcgcgcgccggacatccccagcggatgaccgagcgcgatggcgccgccgttcgggttgacccgcgcgtcgttggcgccgatacgccagtgtttcagcgccgccagaacctgtgaggcgaacgcttcgttaatctcgatgatgtcgaagtcgttcaaggtgaagccgccgcgctgcagcaagcgctcggtggaggcgatcggccccagccccatcagcgccggttcaacgccggcggccgcgctgtcgccgatctccgccagcggttgccacccctggcgcttcacgtagcgaccggaagccaatagcagcgcggcggcgccgtcgttgatgccggaagcgttgcctgccgtgaccgaaccgccggcggagaacgacggtttcagcgcctgtagctgttgcagcgtgctgagccggggaaattcatcctgcgcgaatgtgcgggtcgttttacgatcggccggcacgtccacgggcgtgatttcccgcgccagccggccgctgtcgatcgcccggcgggccttctgctgcgaggccagcgcgaacaggtcctgttcctcgcgtgagatatgttgccgttgggctacgttttccgccgtaatgcccagcggatcgctgccgtagcgctccgccagccgtgggttaacaaagcgccaccccagcgtggtgtcgtacagcttcacgcctttgtcgaacggcgtttcgcctttgctcagcacatagggcgcgcggctcatgctttccacaccgccggccagaatcagttcgctgaggccgctgcggattttcgccgcggcgtagatcaccgcatccaacccggaggcgcaaaggcggttgagggtgatggcaggcaccgacggatccaacccggaaagcagcgccgccatgcgggcgacgttgcggttgtcttcgccggactggttggcgcagcccaggaccacttcgtccagatctgcttccgccgccggatggcgctgcagcaggccgcgaatgatcgtcgccgccatgtcgtcggggcgggtatgcgccaggctgccgccataggcgccgatcgccgtgcgcgtgccgtcgatcagataaacgccgtcatctttaatgctcatcatggatccttaaggcgtggtcgtcagcgccggttgcgcggcgtgcagaagggtgtaatgcggcgcatagcgcgccgcgtgcagcagctgcgccagattgctcagcgtcgtcctgacgtttttctcccccagtttgccgagccagtcgaaaatgccgccggcgtagttaacgcccgcgacggcggcgacatcgatgtcttcccggctgcagacgccgctttccaccatgatcaccgactcattgatcaggctgctgaggacgcgggcgacgataagcgccggggagtccttgataaattcaacctgcgggattgccgtgtgcagcaggcgtaaaaacagcgccttattggccgcagaagcgtggcggctgtgcgccgccaccagatacgtggtgtcggcgtagttcagggcgacatcgatcacaaaggcatccgctgccgtctgctcggccagttggctcgccgtgcggccatcggtgatgctgacggtgaaagcgtcattgatctggacggccgctcccagccccggtaatgccggccgttgttccacgcgcagctgtggccactgaagcgcggctcgctgctgcaacagggtaaaaaaaggatgctcgccgtaaacgcgcagcgtctcgacgtctgcattgttggcggccgtcaccggcggggcggtttcttcggcggcaaaataggagcggccgttctttttccccaacagaccggcatcgaccagtgaacgctgcagatgaccaggggtatagcgcgggtcgtattgcatgtcctgccagatttgccggctgacctgatagttaatgtcttggccgataaaatcggtcagctcgagcggccccatgcggaagcgcccgccggccttgagggcgcggtcgatctgcgccgcgcgcgccacatgttcttccaacaggcggaacccttccaggtagtaggggcgggccatgcgattgacgatgaaccccggcgtggcctggcagacgacatcgcgtttccccaacgccgccaccagttggcggcagcgttccgtggtggcgtgtgcggtaaagtaggccggaatgatttcaatcagcttcatcagcggcgcggggttgaaaaaatgcaaaccgataaagcgctcgctgtgcgtcaccgcagttgccagcttgttaagcgacagtgaggaggtattggtggcgatcagcgtgtcgggcttgaccactgcggcgatggccgccagcacctcaagtttggtttgttcttgctcggcgatggtttctatcaccagctcgctgtcggcgatggcctcaaacacggaagtgaacatcagattggccagcaccgcgtctttatcctgcagcgcgatcttgccctgttcgactttcttgttcaggtcttgcgcgatatattcgcgagcttgattgagggtattgccgttgcgattataaagcatcgtgggaatgcctttttgcgcgaaaagataagcgatgcctctgcccatcgttcccgcgccgataatcgcagccgattgaattgccgcattactttctgccatagaaaatccccgtcactgtatgccatgcgaaattcgcaaatgcttattatctctttggatttacggcggcactgggtgcctgtctggaaagtaattggtggtgtcctggctgtctaacggtagaaatgacaggtttacgtgtcgaggagagtatgctattcgcgtagttttcctgttcggcgcaataaaaaggcttattttaaggggaatagctgttttcgttatagcgttggtattttttattatatgaaacggctactggcgccgggcggcgatattctatagtgaatctgacctatcgataaatcggcatcgctatctggagaatctgcgttatggatacccgcactcaacggctcatggcggaggtgattggcagcctggccgatcgcgaatgctttctgacgcagctggggccctgcgccgaggcgttggggtttgattatttctcctacatcgtgttttcctgttatccggccagcagccccaagatgctgatcgaagggaatatttcaacgaactatctcgaggattatcggcggcagcgggtatatttgcaggatccggttattgagcgtgctcaccattccacgctgcagtttcagtgggacgaaagcttttatcatgagcggccgacgctttggcggcgtatggcgcaattcggcttgtgcgccggttggtcgcagtcggtcaaggattgctatggcaggttggggatcctgacgtttgccggtaaagcgctacctgagcaaacgccgcaagcgcgtgcggcaaatgaaacttttttcctttggctggcgcaaaccgcccataaaacgctgcgggaggccttgatatcggtgaatgatgacgcgataaaagatgtgttgacgctgcgcgaaaaagacattttacgctggagcagcgaagggaaaacggcggaagagatcgcgttgttgatgggggtgagcgagcgcacgatcaatttccacatcggcaactcgattaaaaagctttctgtcgccaataagaccgccgctaccgccaaagcggtttatttacagctaatttaatctcgagtaataaataattaatcgcctatccgttatcggtgtaatgtttatattttgttaaattaaaaactatccttgtcagtatttaccactcgatcacaaaagcgtgataaagcgattcaccgcgcccgtgcgcggcagtattctgttggcacccggtttacatagaaaggacgtgatatgtacaagactattttagtgccgatcgatattgaagaggatctgttgaccgagcatgcgctgaagcatgtggaatatttggcgaagatgtccggcgctaaagtgcatttcttccatgcgctgccggatgcctcggcttttgttactgcctattcgttcggcctcaaggagtttgagaatcaggcggaggtgaaggcggtggatagactgaagaaaatcatgtcggaaatcgatctgccgttggatcgcctcaattacaccgtcagcttcggttctgcacgcgatcaggtgttggaactggcggaagagatcgacgccgatctgatcatcatcggttcgcgtcgcccgagcgtgaaaacctatctgctggggtccaatgccgccgctatcgttcgccatgccaatatttcggtgatggtggtcagataattcatcttaaactcaccgttttcgggcacgttctgcggttaccggccggctgcagagcgtgctttgcgttttattgccatcccagtctgaactgctacgattttagctgacgtttttatgccaaccgggccaccggccttgcgcatatttttcatttcagccagaagaggggcagctatgccattagaagtcgatgggattatcagaggcgatcggggcagtgaaccgagccgttggcaacatgcgtcaaccaaaccgcttatcacgctaacctggcaccacaccattccctggaactgtttgcgtaatgtctggaatggtttggtggcggggcagcattggaacgcgctggacgagtttatgaatctgatcggtgtgccaaaccgcgccgcggtgctcaaacagatccagaataaaaacctgcaggatcgcgatggattacacactctggtgacctggcaaggatggaatatcgtcgaggggccaggtaatgagtatcgcgcgcagggggacgatcccggtgaaaacttcgacggttggtcgggtaaggggatgagcactaatcagcaagcgacgctgcagcaggtcaacgtgttgtatcaggtgatggcgccgctgggaagccgtgcgctggacgccgccagacaggcgccgcccattactgcggaagaagcagacgtcttgcaacggacgattaaacagacccgcccaacgttgcgaggaaaggaaccgatccggtggcaagaagacatgtggcatcaggtgcagccgggtaaagaggcgaaacactttgcacgctgggacaccaaaccggtatggcgcaagcgcctgcacagcgacatggctcaggctggataagcctctccccgcgccgggttgccggcgcggggcataaatccagcgttaatcgcacagcgccactatttcgtcgtacaacgccttggggatttccacgccgtattgctcgctctggcgccgttgccgataacggcgttcgccggggatgcgggcgccttgcgcctgcatatcggcaaacatcgcctccgctccggcgaaatatttcgccttatccgcaccgagaaaacgctcgggatccaacgcgatgaccagctcaccaccgtaaggcgacgaaccggtgccatcgtcataggccagcgattccttgctggtcatatcgccgatcagcggccctgccagcaattcaaccattgccgccagcgccgagcccttatgcccgccgaaggtcagcatcgcgccctccaacacgctggcggcatcggtggacgggttgcctgccttatcaatgccccagccttcaggcagcggggtgccggcgcggcggtgtaattcgatttcgccgcgcgctgccgcgctggtggccatgtcgaacaaaaacggcggccgatccggacgcggccagccgaaggcgatggggttggtgccgaagagcggtcgcgaaccgccggccggcgtcacccaggcgtggctgggcgtgcaggccaaggccaccaacccctgctcggtcagcggttcgatatcggcccacagcgcggagaaatgcacgcagcggttgatcgccagcgcggcgacaccgttggtgcgcactttctcgataaaggccggcagagcggtgcggtaggccagcagggaaaacgcaccgccggcgtcggcgcgcaagatggccggcgcctggtcgagcaatctgggcatcgcatcggcagaaaccttgcctgcccgcagcgatcgcacgcagcccaacagccggtacagcccgtgagaagcgcagccgtcgcgttcgccctgggtgacattttgcgccaccgcctcggcatgcgcctgattgaaactgttgctgcgcagcgtacgcaacgccagttgataagcctgttccagcgacagcacatgcatggatgtcatttcgatgtcctccctgggttcattcttcttcatcgccgataaaattggcctggggtaaacaggtataggcgccccagtagtaaatcgccagcgcaatcaccgccatggtgagggtgtcccatggatgagcaatagcgccgatgccgccgaagctgctgaggtaggaaagcccgatcaccagcgcatagaagacgatcagccacagcgaggaccaaatttgctgcctgaggctaacggcgtgggtcggcacctgattcttgaacaggatgtagatgaagaacatcaggatctgcaagccgagcagccaggagacggtgtcccagccggaccagaagacgatcagcgccgaaatgataaacgacagcgggccgagcacgcagaaaccgcggacccggaacggacgcggcatatcgggcgcattgcgccgcagcccggcggcggtgaccggggcgatggcgtagctcagcaccagtgcggcggacaccacgccgatcagtttttcccaggatgggaacggcagcgtccagaataccgagagagcgaaggtcagccacagcgccgggcgaggaatacctgactcgccatccacccgggtgaacagtttgaagaaggtgccggcgcgcgcccaaccgtagatcacgcggggcgtggcgttcatatagatattgccggtgccgctcggcgaaacgatcgcgtcgctgaccaccagaaacgccagccatcccatgcccagcgtgatggcgatgtcgcggaacggcagggagaactgttggctgatgccggcccagccgccgctcagcatctcgctggggatgctgccgagaaacgctatctgcagcagcacatagatgatggtggacagcaccaccgacaggatcagcgcgatgggaatggtgcgctgcggccgttgcacctcgctggcgaccgaaatgatcggcgtcaggccgaggtaggcgaagatgatgccgccggcggaaatggcggcctcaacgccggcggaaccgaagggagcaaagccctggctgtgcaggttttccggtttgaaaaagctgaacaacaccacgatcaccaacagcggcaccagaaacttcagcacgctgatcaggttattggatttggcgaaggttttgacgctgtaatagttgagcgcgaagaaaaagcacagcagcgccagctgcaccagccagccgatcgcggttggatcgccggaacccggctgactgaggaacgggaaccaggcggcggcgtactgccgggcggcgacgacttcgatggcgatcaggctggagaaggcgatcagcgtgataaaccccagcagataacccatcagttcgccgtgcgagaataccggatagcgaatgatgccgccggcgcgcggcagggcggcgcccagctcgcagtaaacgatgccgagcagcagcaccgccaggccgccgatcagccaggaatagatgccggccgggccggcgatggaggagacatggctggcggcgaacagccaaccggagccgaagatggcgcccagaccgatgaacgtcaggtcggtgagcgtaagctgcttcttgaatttgccttgggttgtcatggtattacccttttgttattgagtggcaggcagatgcggccgggctaatgttgggcaggtgaaaccaggggggctcgggtgtaaacgccgttaaccagccgtagcaggttgagcgggttggcgtcctgcagcgccggcggcaacagcgccgcaggggtgttttgcaaacaaaccggccgcaggaaacgctcgatggccagcgtgcctaccgaggtgccgcgtgcgtcgctggtggccgggtaagggccgccgtgcaccatggcgtcgcacacttccaccccggtcggatacccgttgaacagcacccgaccggctttgcgcgccaacagtgtcgtcagcccggcggccacatcgagatcgtcgtcgtccgccagcaacgtggcggtcaactggccttgcaatgccgttagcgccgcatgcagctgcgcttcgttatccaccgccaccaggatgctgaccgggccgaagacctcttgttgcagcagcgggtcagcctgcagcaacagcgcctcttccgcctgataaagctgcgccgccgcccgaagcgtgggcgtttcgcttcggcctgcgagacgccgcatacctggatgggcatcgaggaccgccagcccgtgacggtagtgctccagcgtgccggcattcagcatcggctgcggctcggcggcgttgaccagggcgctcatcgtttcggttaaccgatcgaaggcggcgccgcgcagcgcgacgattacgccgggcttggtgcagaactgaccgcagccgagtgtgaaggaagagaccagttcctgcgcaatgcgctgcccgcgccgcgccaacgccttgggcaggatcactaccggattgatgctcgacatttctgcgaagaccgggataggttgagggcgttgcatcgccagatcgaagagcgcccggccgccctgcagcgagccggtgaatcccactgcctgaatcgccggatgttgtaccaaatcggcccccacgcggttgccgaagatcatgttgaagacgccggcgggcatccttgtgcgttcccgagcgcgctcgatcgcctgagcggtcagctcggcggtaatcatatggccgctgtgcgccttgaacacgaccgggcagccggcggcgagcgcggcggcggtatcaccgcccgcggtggaaaacgccagcgggaagttgctggcgccgaagaccgccaccgggccgagcgccgtgcggtattgacgcagatcggggcgcggcaggggggaacgctgcggcagcgcgcagtcgatgcgcacgccctcgacgtcaccgcgccgcagcagcgtggcgaacagccgcatctggccgctggttctggcgcgttcgccgctcaaccgcgcagacggcaaggccgtttcctgtatggcgaaggtgaagaaaatatcatccaatgcgtctaactcttcggcgatggcgtcgagaaagttcgcgcgttgttctgcactgagctgtgaatagcgcgcaaaggctgcggcggcggcttctgcggcggcggcggtttctgccgccgtggcctggtggaagcggtagccggttggctgactgtcgtcggcgcgcaggctacacagcgacgcttccccttcggcgcggcgttggccgccgataaattgttggccgctgatggcggcgtagcgatcgttgggcatcggttcccccggtagataaagcatgacgcccggcatggccgggcgatgaaggcgtcacaggccgacgttcggcagcgcagggcgggtggccagcgctttatcgatcacggcgttgatctcggtgagcgtttctccctgcagcgccaggcgcggagggcgagtgacagcgctgccgcggccgacccgctgttcgcagagtttgatgcactgcaccagatcggggcgggcatcgaggtgcagcagcggcataaaccagctgtatagcgccaacgcttcctcatagcgtttttccttcgccagccggaacagggtttccccttcgcgcgggaaggcattggacatgccggagatccagccttgtgcgccgacggcgatgctttccagcaccacatcgtccaatccggcgaacagcacgaagcgatcgccgacttcattgcgcaggtcgataaagcggcgggtatcgcccgacgagtctttgaagcacacgatgttctcgcagtcgaccagcgaggtcagaatgtcgggcgtgacgtcatttttgtaaatgggagggttgttgtagaccattatcggcagatcggtcgcgccagcgacgctgcggaagtgcgcggcggtttcgtgcggtttggcggagtagaccagcgccggcatcaccataattccgtcgacgccggccttttgcgcttcacgcgccatgttctgcgcgaaggcggtggtgaactcggcgatgccggcgatcaccggcactttaccgtcggcggcgtctttcgccacctcgatcaccgccagcttttcctgcactgtcatcgaggtattttcaccgacggtgccgcacaccaccaggccggagacgccgtcgcgcaccaggtttttgatcaccgtatgggtggcgtcgagatccagagagaaatcgttgcgaaattgggtcgtcaccgccgggaatacgccgctccagcttagggttttatggctcatcgtgtttgtcctgtcgtccgaaagtgttaatgaaaagtgaatctttggtaaggctcaccgacagattgaccggtattgcgcagggaggcttgacgcttttcgccgattgccgcgacgaaattggcacaatagcggcggaaatcgggcgtgaaaaatcgggcgtaggtacgccgtgagaagagagggttaacggggtaaatcagcgcgttaagcggaaagcgtcaggcgaaaatcgcgcggcgtggagccggtcatcgctttgaactgacggctgaaggcgctgtgatcggtatagccgcactgcagcgcgatgtccgtgatcggcagatcgccggccaggagttccgtggccttttccagccgcactttgtggatcatctggcgcggggtgaggtggaagatacgtttgcagtagcgttcgatctgcgccaccgataacccggtcagcgccgtcagctcttcaagcgcgatcggtctggcgtagtggcggcggatatgcacgtcgatcgccgccagccgctggtaggccgggtgattggctctggcctcctgcagatcgtgagaaatacccgccataccgatgatttttccctgcgcgtcatacagcgccagcttttgcgtcaggcaccagccggtttctcggccgttgtacaggtgcatttccagctgatcctggatcaacacgccgtggcgcaatacccgcagatcctgctcggtatagccggatccgagctgagcgggaaaaacgtcggcggaggttttgcccagcagcggcgtcacggttttgaaaccgcagcgcctggccagcgtcaggttagccagcaggtagcgagcctgggcgtctttgataaagaacaccacgttggggatcgcgttcagcaacggcgcgatcagcgccagcgtattcagcagatcgcgcaggttgttcgggcgctgctgcgccagcccgtcgcacaggcgcgacaaatgttcgacggcgaaaacgtcctcctgatccggcagccccaccagggctggcggcgagagagaaatctgatgttgatggtctgaaatggatcgcatagcagtcccttttcggtcgttagccggaaaaacaggcgagccagattggcgctttcgcatcaatattaacttttttgtaacgaagcaagcgctatttccggcgggctgccaaatatgcggattgccgcatacttttgccggacggtgtttggcggttgcttgaaaactgaggcgtttctcgctacacaagggtttagcatgaaaataacgacatgataaataagtcattattatgacaaccgttaaactcatacccgcgacgcgtcaggcctgacgtttgtcactgtgctgatttcttcattcgctgcgccgaaatgcatcaagccgtcatgctcacattcgttcaggctaatgccattggtaacatctcattaacccaggagacgccgatggcactttctgcgcatatcaccgctttgcgggcgatcgattctcataccggcggagagccgacccgcctgatcgtggaaggttttcccgatctcggcgagggtagcatggcggaacggcgggcgcgtttcgcacaacattatgacgattggcgctgcgcggtgatgctcgaaccgcgtggcaatgacgtgctggtgggggcattgctgtgccgcccctgctcgccacaggccaccgccggggtgatcttctttaacaacagcggctatctgggcatgtgcgggcacggcactatcgggctgatcgcttcgctggctcatctggggcgcatccacgccgggcgccacctgatcgagaccccggtcggcccggtaagcgccacgctgcatgatgacggcagcgtcacggtggagaacgtggcggcttatcgctaccgccgccaggtgcggcttgaggttgccggtcacgggccggtgacgggtgacatcgcctgggggggcaactggtttttcctgatcggcgagtcaccgttgcccatcgataaacacaatctggaggccttgaccgcgttcacctgggcggtgcgacaaacgttggaacaggcgggcatccgcggtgaagacggcggagcgatagaccatatcgaactgttcggtgacgatccgcaggccgacagccgcagcttcgtgctgtgccccggcaaagcctatgaccgttctccgtgcggtaccggcaccagcgccaaactggcgtgtctggcggcggacggcaaactgccgccggacacgcagtggcggcaggccagcgtgatcggcagcgaattccaggcctattatcgttggaacggcgatcgcattgccccctttattcgcgggcaggcctatgtgtgcgccgatagccaactgctgctcgacgaacgcgatcccttcgtctgggggatacgctgatgggcgccgagcggggagccgatgtcatcgtggtcggtgccggtatcatcggcgccgcttgcgcctggcggctggcgcgggaagggtatcgtgtctcggtggtggatgatcgccgcgccggcgccaccgccgccggtatggggcatctggtttgcatggacgataatcctgccgagctggcgttgagcgcttattcgctgcggttgtggcgcgaagtgacggggcgcatgccggaaacctgcgcctggcgtggctgcggtacgctgtggttggcggatcaagcggatgaaatggccatcgccgagcaaaagcgggcgcggctggcggagcagggcgtggccgcggaactgctgacggcagagcagatcgccgtcatggagccgatgctgcggcacggcctggccggcggactgcgggtgccgggcgacggcattctgtatgcgccgctcgcggctcgctggctgttggccgaccgtggtgcggcaattgacgtggtgcatggtgaagcgacagcgttggaagaggaagccgtgcggctggcggacggcagacgtctggccgcgccggtggtggtcctggcctgcggccttagggccaatagcctattaccgcagactttgcttcacgccaagaagggccaactggcgatcaccgatcgctacccgccgcgggtgcggcatcaactggtggagctggggtatggcgccagcgcgcatgccagtaacggcacgtcggtggctttcaatgtgcaggcgcggcccaccggacaatggctgatcggctcttcccgccagttcgacgccgtcgattcggcgttggacatgccgctgttggcggcaatgcttacgcgtgcgcagcatttcttgcccgcactggcgcagatgaacatcattcgctgctggaccgggttgcgcgccgcctctgccgacgggctgccgttgttgggtgtgcatccgcggcattcctggctgtggctggctttggggcatgagggattgggcgccacgacagcgctcggcagcgctgcgctgattactgcacagattggccggcaaacgccggagattgacgattccccgtatttggctgcgcgggcgtttgccgccgaggagttgcctgtatgaatgaaagacaaaatacgatcgcgttgagcatcgatggagaacaccggcgggtgccggttggtctcagcgttgctgcggcgctcagcctgtgcggcgacgatcgttgtcggttatctgtttcacaccaaccgcgtgctcccttttgtggcatgggcgtttgtcaggagtgccgggtgaccattaacggcctgcgtcgcctggcgtgccaaacgctgtgccaagccggcatgcgcatagagaggaacgatgatgagtaacttcagttgtgaggtgctgatcgtcggtgccgggccggccggcatggcggcggcgctggccgctgcggaaagtggtggccaggtgcgaatgattgatgataatccgcatcccggcgggcaaatctggcgcgacgggatgcaggtggctttacctgaaacggcgaaccgctatcggcaggcggtggcggcgcgggaaaatattgcgctgcagtctggctgcaagctggtggcgcagtgtggcgctaaccgattggcatatgaagacgccgagggctgcggcgtgattcgctatcaaaagctgattttatgcaatggcgcgcgtgaattgttgttgccgtttcccggctggacgctgccgggggtgaccggcgccggtggtctacaggcgcaaatcaagcaggggttggcgatccgcggcgagcgagtggtgatcgccggcagtggtccgctgctgttggcggtggccgacagcgtgaaacaggccggtggagaggtggtcatgttggcggagcaggcgccgctttggcggttggcggcgtttgccggcggcctgtggcgctggccggccaagctgcgtcaggcgttttctctgatgccgcatcgttaccgtgccggtagccgggtgcaggcggcgttggggcaagcacgtttaacctcggtgcgtgtcaataacggcgggcgggaaagaacgatcgcctgtgacaggttggcctgcggttttggtctggtggcgaacattgagttggcgatgctgctggggtgtcggatagagcatgacgccgtagcggtgaatcattggcagcaaaccagccaggtgcaaatttttgctgccggggagtgtaccggcatcggcggcagtgaattggcgctcactgaaggcgccattgcaggttatgccgccaccgggcagcgggaaaaggcagagcgcctggcggcgcagcggcggcggtggcggcgtttcgccacggcggcggcaagtgccttcgcactcgatgagcgcttgaattcgctggccaatccgcaaacgttactgtgccgctgcgaagacgttacgttggaacaggtacgccatcagccggattggaacacggctaagatgaacagccgctgtggtatgggggcatgccagggtaaagtctgcgcaacggcggcgaggcagcttttgggctggcctttgccgtcgccgcgtgtgcctttaacgccggtcaggacagaaacgctggttgcgctggggctgaaccgatgtgatgacgatggttgaatgggttagcggcatctcgccccaggcaaacgccgccacattaccattgcggccaatagtaggttttctcccgccagcctttgccgtacatacaggcttcgatggtggcgtctcgggcggactgattgcgatcggtctgcactgttttaatcgacggctccttgtcgtagcggtatcccgatggacagtctttcttattcttctcgcaaggaatgtatttgttttcgtagctgaactccacgtcccgcaccacgtccggggggaagcgatcgtatccgcggctgcggcattcggcatattcggcattccgggtactctcaaccgcgccaggcctttcccattgggtgcaggcggtcaacatcaataacggcaaaacaatcaaacaacggaaattcttcatggtgtccctaactctttctctatcctgaggctcgcagcctaggaatgttcctaactgacgaggtgggaaagtgtaataaactggcggaacaattggaaatgataatggttattgtttaggtgtgattgaggaagtgccgcgttgagagaggatgtggtgcattgagggcagtctgtaaggatccgcgacctcactgcgagggctggacgatgtggcattgattttattcattctctttatgccgcaatgatccgaccgcaattgcatcgttttaatgagggaaataatatgcaggctaagtattttcttatccggtatgactattatttttatttaggatatttacccatgccaaggatttaatgctcagtattaataccttatttttttatttctgtttttttattggggttttattttcaggttttttctggggaaggctttttagttacagggaattcatttgcattttaaatttggattttttaaattcattttagaggaaggataaccgtacgcgacagagtcaaaaaaggagtttattttgtctgggataaagaaaacgcctgaaagtcatgacggtttaccttcaccatcagaggattatgatacttttaagcacctctccgatgttggcgccgtgttgggatatgggcgaacccgcttttatcagtggtgccgtgggcgcggatttctaaccccgatgaacgttccgtcccatgaaatgatcagcctgggatatatggtggcggtattatcagagaccggtcatacccgggtttatgtcacgcaggatggtttcagttacgtcagtggtgcttttgcggcagatatccaacgtggcatgatcaagttttaaatctgcaagaatcgcctttatttcaatggctttaatgcggaatcttcttatccctgcaggtccgtgataggagtgggaagttatccgattttttcgtctctgcggtatgaaggctactggagacagctattctcttgctacgataagcattattttcttcaggagccaaggatgaagcattacgccgcgttgttatttgcctctgcactgctgacggggtgtgcgactcaagccgtaccgccgcaacaggctgagttgccccccccaagccgtctgatgctctatcagaatatcccgaatacgccttacgctacggtggtcgtggtgcgcgacagcggaatgctggcgggcagctgccgcactggcgtctatgtgaatggggagtttgccgcttcactcgaggcaaaagaaaaagcagagtttcgcgtgccgccaggcaatatttcggtcagtatcgggcaagatatgatcgagaactctctatgtatttggcgtgaaaccagcggcagcgtgccgatgacgctgcgcgccggtgaaagccgctatctgcgcatcgccggcgatcggcagcgaggcttcgtgttgcaggcagggcggccgtaacagcccaggcaagggcgttaacgcccttgccaccatccccacagcgtaattaatagccacgccgccgcaatccagcacagtaccgccgcccccagcgctaacgacagccgcaggctgttaatcaggaaatacagcgaaatcaaatataccaggtagggcaataccgcccacatgccgaaaatcagcgtcgttttcagtgccgcaattgaacgttcgctgccgacaatgtaatgcgcaatcagggcgaaagtgggaaagagcgggactaaaccggcgatatagtagttgcgcgttttggccagcaggccgattagaaccacgaccagcgcgccgatcagcgctttgacaaggatgcccataacggtctcgggtgtgggggagaaagtcaacacactgcccgaaagcacgtgcaagatcaatggagtgtggcgcagcgtggtgaaaagcagacccacaagaagtgcgggtctggggcgcaacgcttactgacggtaagcgtgcttgatttgctgaatgctgttcttgaagatttctgcctgagtcggatcttcaatctgcgcgatgaaacgttccatgttgatgatgactttcccggcgtcggcctggccgatcgacttcaagatcagcgtcagcgtagctttgaggcaggcaacctcggtcgccaagatttccgggtttgcagacgtagtgaaatcaacgttgctcattttctctcctgattttttgaggccgtagcctgatacaagctgctttggcgcaccgcgcgcgggctaaaaagtagccccgggcgcggcggcgaatttaactgggcgcggagtatagcatagcatgagtctgtcatctgcaccgggcttgctcaggtctcgcgggtgggcaacgttcgctcattgcctgtctgaatcatctactcttggcaagttatttcgaggtggttaacaagtatttttccggtacgttattgttgaacaatcggggttattataattattgggggcggaggcgccgattttaccggcgtttgccgggaataatagtttcgaccgagggttgccggacccacgttggccgcagattttgttacgcctttaaatatcaaatgattacaaacagccaacagccgtgttaatattattcatgtcgtgattgcttacacagatttctccctcgcggcatgattgtcgcgctatcctgtgtcagacgcagcgcgacgaaattattttcgtcgcccgatcttttccgacgtgacgatttatcggcggcatagacggctaaaattgaaaaatcagctctgctccgcaaagttattcggaagtatgtattaatctgtgttcattcttgtctgaaaaacaagtaatatctctggcgaaaacagaggccgattgcgttactccctttttttggagatttttccttgattagcgttcttcttgttgatgaccacgaactggtgcgcgcagggatacgacgcattcttgaagatatcaaaggtataaaagttgtcggtgaggctcagtgcggtgaagacgccgtaaaatggtgccgcggcaacgctgtcgatatcgtgctgatggacatgaatatgccgggcattggcgggctggaagccacgcgcaagattgtgcgttatgcacccgacgtcaaagtcatcatgttgaccatccatactgaaaaccctttgcccgcgaaggtgatgcaggcgggtgccgccggttacctgagcaagggcgccgcgccgcaggaagtgattaacgccttgcgttccgtgcatgccgggcagcgctatatcgcgtctgatatcgcacagcagatggccctgagtcagttggaaccgcaggctgaaacgccgttcagctgcttgtctgaacgcgagttacagatcatgttgatgatcaccaaaggcaaaaaagtgaatgagatctcggaacaactgagtctcagcccgaaaacggtgaacagctaccgttaccgcatgttcagcaaactgaatatcagcggcgacgtcgaattgactcacctggccatccgacatggattgttcaatgcggagacgttgttaagcagtgaatgaccgttttgatgccaaagccttcctgagtaccgtcaccagccagcccggcgtctaccgtatgtatgacgccacgggtacggtgatctacgtcggtaaagccaaagacctgaaaaagcgtctcgccagctattttcggcagcaggtcagcagccgtaaaaccgagacgctggttaaaaatatcgcgcaaatagacgtaacggttacccacaccgagacagaagcgctgctgttggaacataactacattaaattgtaccaaccgcgatataatgttcttttgcgagacgataaatcttacccgctgatttttctcagtgcggatacccatccccgtttggctgtgcatcgcggcgccaaacacgccaaaggcgaatatttcgggcctttccctaactcttacgccgtgcgcgagacgctggcgctgctgcagaagctgttcccaatccgccagtgcgaaaacagcgtgtatcgcaaccgttcgcgtccgtgcctgcagtatcagatcggccgctgtttggggccttgtgttgccgggctggtgagcgaagaagagtaccggcagcaggtggattacgtgcggctgtttctttctggcaaagatcagcaggtattgcaccagctgattgagcgtatggaagaagccagcaaactgcttaatttcgaagaagcggcgcgcattcgcgatcaaattcaggctgtgcgccgcgtcacagaacggcagttcgtgtcgggcgacagcgacgatctggacgtgatcggcgtggcgttcgatgccggtatggcgtgcctgcacgtgctgttcatccgtcagggcaaggtgctgggcagccgcagctatttccctaaagtgccgggcggcacggatatgggtgaggtggtgcagacctttgtcggccagttctatctgcaaggcagccaggcgcgtacgctgcccggcgagatcctgctggatttcagcctgccggaaaaagacctgcttgcggaatcgctctccgagttggcggggcgcaagatccaaattcaaagcaaaccgcgcggcgatcgcgcccgttatctgaaactggcgcgcaccaacgcggcaacggcgttgaccaccaggctgtcgcaacagtcgacgatccatcagcggctggcggaattggccaaagtgctgaacctgacggaaatcaaccgtatggagtgcttcgatatcagccataccatgggtgagcagaccgtggcttcgtgcgtggtgttcgacggaaacggccccgtgcgagcggagtatcggcgttacaatatcagcggcattactcctggcgatgactacgcggcgatgacgcaggtgctgaagcgccgttacggcaaggcgctggaagagaaaaagatcccggatgtcatcttcatcgacggcggtaaagggcagctcggcatggcgatcgacgtattcaaatcgctgaatgttacctgggacaagaataagccgctgttgatcggcatcgccaaaggcgccgaccgcaaggcagggttagaaacgttgttcttcgtgccggaaggtgaagggatttctctgccgccggattcgccggcgctgcatgtgatccaacacatccgcgacgattcgcacaatcatgccattaccggtcaccggcagagaagggcgaaagtcaggaataccagcgcattggagctgattgaaggcgtagggccgaaacggcgccaggtgctgttgaagtatatgggcggactgcaacctttgttgaacgccagcgtggaggaaattgcaaaagtgccgggtatttcacaagcattggcagaaaagatctacaatgcattgaaacactgagggcaatgtagcaacatactcttaatttccactctagccagatagttaccgtagcattatgcaattgaatataccgacttggcttaccctgtttcgcgtagttctgatcccattctttgtgctggcgttttatctgccgttcaactgggctccgatggtttgcgccgttatctttgtgtttgccgccgtcaccgactggtttgacggcttcctggcacgtcgctggaaacaaacgacgcgcttcggggcgtttttggatccggtcgcggacaaagtgatggtggcggtggcgttggtgctggtggctgagcactaccacagctggtggatcacgctgccggcggccaccatgatcgcccgtgaaatcatcatttcgtcgctgcgcgagtggatggcggaaattggcaaacgcagcagcgtggcggtgtcctggatcggcaaagtgaaaaccatggcgcagatgatgtcgctggtgggcttgctgtggcggccggatcgttccgtagagtatgtggcgattggcttgttgtatatcgcggcggtgctgactttctggtcgatgttccaatatttgaacgcggcacgcaacgatttgctggaaccgtgatcgatacgctgcaaaaagcggcaaacgatcgtggtgtgccaacaattttattgactcatcacgtcaggtaagtagaatgaatcgcatcagacgacaacgatgaattgccgaaagatagcaaagaaatcagtaagttctggtaatgcgggaatagctcagttggtagagcgcaaccttgccaaggttgaggtcgcgagttcgagcctcgtttcccgctccaaacattagcctgttgaatcttcgtgattcggcaggtaagaaaaaggggcttcggcccctttttcgttttctattcctttgccgtccggcgaaacctttcttcatcttcctgcatcgattcttgtccctatatctcctgccattttcataccgcaggatactcctgaaaacaggcacatttgattggatatcatgtcgatgctctgtggggtattgatgccgagccatcgtgcggcgtacaacgcgatgtgagtctccagttctgcagttgcgttggtcgttcagggcggtggcaccgaagattgcgcgatgtccccatcgcgatgtccccatgatgatgctttgcccggtaccccatgatcgtaagcaaatgaaaagccggggagggcacgggtaagcgattcctgtcgagaaaaaagatccgatttgcccgtgaatccctaagccgatgcatataaaatcaacattccgcttgcctttccgttggcattgtgaacagtgcgcccacaaaataagcagttgaaagcgttagagaactttttgctatttcggggggttgccaaggtggggggtttagtccataatgcagtccatcgattcggcggtgacgaaataaattacttaagaatcagatgattaagataagcgatttcaacatcgcgattgaaaagaacaaaacgaagtgggtgaatcaccggctttggcctgaaaaggcaaacagaataaaggcgcgttaacaaagcggttatgtagcggattgcaaatccgtccagtccggttcgactccggaacgcgcctccaactttcccgagcccgggtggtgaaatcggtagacacaagggatttaaaatccctcggcttatggctgtgcgggttcaagtcccgccccgggtaccagggaacaaaaataccgaataatcaaagcaataagtagtaatgtcgtagaccgccgagaggcggtttttttgtttttgtaattcgcgttacgcctgcattttttcctttcttgtcatgccgctaccctgcctgcagggagccccgcagggctccgaagtacaactcataagaaaccgaacgccgcagcgaggatccagccgaagacgcaggagacgctgacgccaatcaggccgggcagaataaagctgtggttgatcacgaagcggccgatgcgggtggtgccggagcggtcgaactggattgccgccagatcgctggggtaggtcggcaaaatataataaccgtagcaggccggcgctgaagcgacgatataggccgggttgacgccgatcgccagcgccaccggcaccagcgccgccagcgcggcagcctgcgaattgacgaatttcgacaccagcagcaggatcagcgcataggcccaggggtactctttcaccagcacgcccagcgtggcttctatctgcgtcaggtgcgcgccgaacatggtttccgccatccaggcgacgccatacaccgccacgatggcgatcatgccggaacggaacacctcgtttttagagatagacgccgggttggtgcgggtaatgataacgatcaacgccccggccatcagcatgcacatctggatcaccagaaccatggagagcggcttgccgccgaagctgggccgcaggccggaaaaggcccccagcaccgccaccagggcgatggtggcgaggaaaatccacatggcgatccagttgctgcgcggcaatacccgatccagcagggtagcggcgtcgccgtagacatagcgatggttctccggcaccgagatgaacttctggaactccgggtctttgtccaggtctttgccgcggaaccagctgaagatgccgatcgccagaatgccgcacagcgtcgaagggatggtgatagacagcagatcgaggaattccagatggcggccattgaaggtgtagctgctgagcattgccaccagtgacaccaccgccaccgagaccgggctggcgataatgcccatctgcgcgccgatcgaactggccgccatcggccgttccgggcggatattatttttgatcgccacgtcatagatgatcggcaagatggtgtacaccacatggccggtgccgcacaggatagtgagaatgcaggtgacgaagggggcgatgatcgagacataacgcgggttgtgccgcagcatccgctcggcgatctgcagcatgacgtccaacccgcctgaggcttgcagggtggcggaggccgccaccaccgcgatgatcaccagcatcacgtctaccggcggtttgccgggctgcaggtgaaagccaaacaccaggatcatcaaaccaataccgcccagtaaccccagcgcaatgccgcccttacgcgccccatacagcaggcatgccaatataaccgctaattgcagaaagaaatccatgatagatacgccttaataatgttgaacttaactgcgttcagtttccggcggtgtttacagtagaaagttgttttaaatctaaaggcgctaaaaaattgtggttattagctctaaagagtgatgacggtcacgttcagagaatctgaagagcaggcggctgacgacatcagcacgaaaaagcaagttaagaggtcagacctctcctatataaccggtttaccaccagaggagagagcaatggatccgacaaaaatgaccgggctggcgttattacaggctgcgatggctggcaagatcccaccggcctcgatcgctgaaaccgtgcccatgaaaccggtcgcggtggaagaggggtatatccgcatcgcggcgcgggccgacgggcgccatctgaatccactggggggcgtacatggcggtttcgccgccacggttttggactcggtgaccggttgcgcggtgcacagtacgctgggcgcggggattggctatggcaccgtcgatctgcaggttaaaatgttgcgccctgtgccgaaggaaactgatctgatcgccgaggggcgtctggtctatgcggcgaagaacgtcgcttttgctgaaggcacgctcaaaacggcggaagggaagctgctggcttcggcaaccgccacttgctttattattcgccccaccgaacaagcaccgcaataacctgctttttatcgggcttcgggctatcaacccggagccggatgcatttatcttctatcttcggctgcatgccttgctgcgctacgatggcaggcgcgatacgccattgtggtctagtattcttgggtgaaaatttatcggggtgattatgcagccgtataaagaggttgagtttgatcatgagctttgtctggcgatcggcaaagccgtattagacgtggtggcgcagggggaagaaaccagcgctccggcggtgatgaacgcgattgagcggtcggtggcgcagggtctgaatgacgacgaaaccgccatcgccgacgacgccctggatgtgatggctcgtctcatccacggtttcagattcattaatctcgcgggtgaagaggatactccccatgcattggttgaatttcaagcgctacaagagtgacgttgccaaacaggccgtgccgccgcatttgaatgcggctgagtttgcgcggcattacgccgacaagccgcaagccgatacggaagagtacctttcgttgagcggggagatgtgctgggatgcggtggtgctttgcgctcaccgttcaggtgcgctcagcaaggcgaaatacaagcagctgtggctgacggtgttcgataagcaatataaacatttcgtcagccctgatgataccgagatccgcaccatggcggatatgctgcgcgcgccgcagggatgttttatcggtatattttccatgcgcgatgcggcggcgccccgattgctgcatgccatgatcggcaccggtgcgggatttgccgcgggcaataaaaatctttgcatcggcgtgggcggcgcggtcggttgggaaaatctcaatctggcgcgcgatctgcgctggcagccggaaggcggttttttacgccagggcgacaacgaagtgctgcgcattttttatcggcctttccccgcctgaaccaccggccgcaggctttttaggataaaagaccgccgcccggcggttttttgttgcttacttaaacccgccgttgcgtatgaactcgagaccggcggtggtgatccgcgtttggtgcggatcgatatcatagttgttctcgtcgatgtcgctcatcacataggcttgtatcagccccttggttttaagataggcgaagggatcggcgaaggcgtgcgggctggtggcgtcctgcttccacagttcgtaggttttttcatccagcgtgccggggtgattggcggccaggtgggtcaggatctgattgtagaactcatagtcggtcatgatgcggtcctctttatcgcgagcgacagtctcggaaaatggcgtaacgtctatcaatcatagccgaagtttcccaccgcctgcggcggcgtcgggttagccgcgttggctttcaatccagtgaaacagacgtgaaatgctgaaggtgatatcgccaatgttgaaaagcgcgccgagccacagggtcagcatcaccaggatgccgataatgatgggaaggtccattttgctcatgatcatgttcttcatcaataaagagtgtgcggcaaagcgtaccaccaatcctgattgtcataaaaatgcgctggcattatttcttttgaaatcaaagtaaaaaagccacccaaacgggtggctttcagcggcgatcagtccagcttggggtgctggtctatcaggatctgctttttcttttccagctcggcgatctgcgcgttgatgtcctcgactttctgttcgatgttgtcgtaggtctcctgcagcagttctttcgcttcggtacggtcagaagcggccggcgtcgcgccgcgcagcggcttgttggcggtctctttcatgtacagaccggtgataagaccgatcaccgccacaaccatcaggtagtaggccggcatgtacaggttgccggtcgcttcgaccagccaggcagcgacggtcggtgtcgcaccggcgatcagtaccgaaatgttgaacgaaatcgccagcgcgctgtagcggatgtgcgtcgggaacattgccggcagaatcgaggccattaccccggtgaaggagttgagcagcaccgccagcaccagcaggccgacgaagatcaggccgatgacgttgctgttgatcaaaatgaagcacgggatcgccagcgccaacaggccgatgctgccgccgatgataaacggcttacgaccgatacggtcgctggtcaggccgatcaccggctgcacgaacagcatgccgatcatgatggcgatgatgatcagaacgccgtgatcctccgagtagtgcaggttatgcgacaggtagctcggcatgtaggtcagcagcatgtaataggtcacgttggtggaaatcacgataccgacgcacaccagcaaacttttccagtgtttggccgcgatctctttgaacgaggttttcggcggattttcgatggcgttgcgatcctctttctccatcttatccacgtgctgctggaacgccggggtttcttccagcgcatggcgcagatagagaccgatcaggcccagcggggcggcgatgaagaacggaatgcgccagccccagtcgaggaagttggcttcgccgacgatgctggagatcagcaccactacgcctgcacccatcacaaagccggcgatggagccgaaatccagccagctgcccataaagccgcgtttgcggtccggtgagtattcggcgacgaagatcgccgcaccggaatattcaccgccgacggagaagccctgcgccagtttggccagcagcagcaggatcggggcccagatgccgatcgacgcataggacgggatcaggccgatacagaaggtgctgaccgccatgatgataatggtgaccgagagaactttttgccggccgaacttgtcgcccatagcgccgaagaacagaccaccgagcggacgcaccaggaagggcacggagaaggtcgccagcgcggcgatcatttgtacgccgggagaggcgccggggaagaagacctggccaagcgcataggcgacaaagccgtatacgccgaagtcgaaccactccatcgcgttgcccagggccgccgcggtgatcgccttcttgagtttgctgtcatcgatgatggtgatgtcgttaatgtgcatcggtttatgtcgtttttttcttaacttcatataatcatcccttaatgaattattcgttgttcgtgaaagcgtcatctccgttcactgttgttttcgagttatcaaatcggctaatcgaatcgcgattcaaaacgattcattatccacatttaagttgggatgtggatcacaaaatatcgtcgtttatgccaaggttatgtcatttaggtgactaattattttgcatctatagcttaacgttatatcttgcggcgatcaaatccagcagtttaacttaagtatttgcaccgatttggtgcgagaatagtctaataattgtgctatttgacggtttttcgtctgattgatgatgtttcaagtatagagagtacgggagataaaacaggaaaaattgatgtgttcgtcgctaaaaaaacgcctgaccaactggccaggcagtttggattagggcgccgacgaaccgccgaactccagatagattttcgccaggttctggtactgcgcgaagcggttttcatccaccgccagttccgcctgacggcgttgttcctgagcgttcagccagtcggtaatggtgacggcgccctgtcggtaacgcacctcgttcaaccgctccgatttacgcgccaacgccaatgaggcgcgcaactgcgtctcctgcgccagcagctgcgtgcgcagtgacagcgcattgttcacatcgcccatcgctttgtacagcgcctgcttgaaggccagaacttgctgttcatagtcgttgcgggcgatcttgatttccacgcccatttgccgccactgcaggaacggcagcgtcaggctggcgctgaggctgcccgtcgggttgcgcaggaattccagcagcgcgctgctgctggcgcccagtgaaccggtcaggctgaactcgggatagtattgcagacgtttttcatcgacgttggccagggcggcgcgcaaccgcagctcttgagcgctgagatccgggcgacggctcaggacgctggcgggaatgccggtgttgatctgcggcatcgccgccgtcggcaggcgtgcgggcgcgatggtggcctggcccgaaggcgcacccagcagcaccgcctgttcgttcagcgcctgttggcgttcgtgctgcaatgccagcagccggctttcctgcgtcagcaagctttgctccgcgttcaccacgtccagcgccgagatgctgccggcctgataacgggcgttggccagccgtagcgtcgttttggcataggcgatgctcgcccggctgacgtcgatctgctgattgaggaagccgatgcgccagtaattcgtggcggcatcggccagcagcgtcaggcgcgccgtttgcagatcctgctcggaagcctggctggcccactcggcggcgtcgcgctggcgcgccagtttaccccacagatcgacttcatagctcgtagagagtgtcgcgttgctggttttattccacgcggaggactcggacagcgggcgattaatgctgctgcctaatgaggcgctgacgccgggcgcggtgctgatgccgacgcgttccgcctcgagccgcgcgcggtaaacgcgcagcacggcggcggccagatcgttattgctcgccatcaccagttgcagccaacgatcgagctcgggatcgtggaaatcgcgccagtcgaacggcgtcggcgcggcgttgtcggcagcgtattgccaccccgcaggatagttgacctgcggcgcccggtagtcgcttttcagggcattgccgcagccggcggtgagcagggcggcgaggcttaacgccaggggagataaaattttcatgggttactcgctggccaatgaaacgaccggatccatccttgccgctttgcgggcggggagataaccgaagatcatgccgattaaggttgaacagaaaaatgccgtggcggcggcttgccaggaatagatggcggtgaacatgccgcccgccagcgaggtgaacagcgacccggcggcgaacgatagcgcgatgcccaaagcgccgccgatcagacagaccagcaccgcctctatcatgaactgttgcatgatgtcgctgcgccgcgcgccgaccgccatacgcacgccgatttcgtgggtgcgttcggtcaccgagaccagcatgatgttcatcacgcccaggctgccgatcaccagcgcgatggacgccaccatcaggatcagcaggctaaaagtcattgacgtgcgttcgatggactttcggattttatcgaagttgtacaaacggaaatcttttacgccatggcgttgggtcaacagctgtgtgatagcggtgacggccgattcgctggcgacattgtcctttagccgaacggtgatgccgctgagcgtcggtttgcctaccatgcgatacatcaccgtgctgtagggcatccaaacagtgatgcgattgggcgcgtagttgcgattgcttttcgccacaccgatcacccgtgccggcaccgagccgagaaacacgatctggccgagcggctcgacgccgaaatcgccgaacagcgcctggcgcgcattgtcgtcgatgatcacttcctgcagcgcattacgatcgtcgcggaaagtcacgccttgtaacagctcgacgccgttaacgcggaaatagtcgcgcccgacgccggtgatcgaggcggtggcggatttgctgcgaaaacggatgctgtcggaagcgtctacttccgggctgacgctgtcgacgaagctttgctgcgccagcgcgtcggcatcggccggcaccagggtgcggatgctgtcgatggcgtcgtcgaagaaatcgcggcccggatagatgcttaccacgttagtgccgagatctttgaggttttccagcgtgcgctgtttggcgccttcgcccagcgccactaccgtgaccactgcggcgatgccgaagatgatgccggtcatggtcagcgcggtgcgcagacgatgagcgttcatcgctttcagcgccatgtgcagcgattcgcgggtgcggtcaatcaggcgttgccagccgctttgccggctgcggttcggcggcggcaacgatgggccggacgccgatttgcggccgctgtcagcgatgatcttgccgtcttgcagttcgatgacgcgctgcgcatgttgcgccactttcatatcgtgggtgacgatcaccacggtatggccgcgctgattcagttcgctcaggatcgccagcacttcctggccggattgggtgtccagcgcgccggtcggttcgtccgccaggataatttcgccgccgttgatcagggagcgggcgatgctgacgcgctgctgttggccgccggaaagctggccgggcttgtggtcttcgcgtccctccaggcctaaccgcgccagcagttgcgccgcccgcagccgccgctgatcgcgccgggcgttggcgtagatggccgggatttcgacgttgcccagcgcgctgagatcgggcatcaggtgatagcgctggaagataaaaccgatatgttcgcggcgcaggcgggccagttcgtccggcgacaggtgggcggcgttctggccgctgatgtagtaatcgccgcgatccggcacgtcgaggcagcccatgatgttcatcagcgtcgatttgcctgagccggaagcgccgatgatcgccaccagctcgccggcggcgatggtcagatcgatgtctttcaacaccgttaacgcttgaccgccgttggtgtacgttcggctgatgccttttagttcgatgatcgcgttcacaggaagatgccatcctcagccgatttggcggcgggctgcgacagcaccacggtttcaccggctttcaggccgctgaggatctgaatgtcgacattgttggtgatgccggtggtcactttgcgcgtttccaaccgctggtcctgggtcagcacctgcacctgctgcatttctccttcggctttatgcaccgcctggatcggcaccagcagggtgttcttcgcgtcgccgagcagcaaggacacctgcgcggtcatggcaatgcgcaggcggttctccgggttgggtacgtccagcagcgcgttgtaatagaccgaggcgttcgaggtgccggagccggaagcggagctggtgccggcgagcgaatcgtctttcatcaccgattccggcgccagctcgatggtgcgcagcgtggcgtcgtaccgtttatccggatcggagaaaatagtgaagtacgccttttgccccggtgaaatgcgggtgatgtcggcttcggagatctgcgccttgatggtcatcatatccaaccgcgccagcttgacgatggtcggcgcgctttggctggagttgaccgtttgcccctgctgcgtgaccacggcgataacgatgccgtccatcggcgcaaccacgcgggtatagcccagatcgatttttttcttctcgacttcgatctgcgattgcaccaactgcgcattgagcgcctgcagatcggcgcgagtggtggcgagcgaggcttcggcagtttcgaagtcttcccgcgaactggcttcgtcgttcagcatgcggcgctggcgtttgaaacgcgactccgcctgtttcagcaaggcctgtttggctaacatattggctttgactacgttcagcgccgcctcggcgttgcgcagatcgttgcgctgttgcagatcgtcgatgtcggcgatcggttgccctttggtgacgcgatcgcccagcttgaccttcagcgatttgacttcgccggagacgcgggcgccgacgttgacgcgttcgatggcatccagccgcccggtggccagcacggcgttttcgatatcgcccaggcgggccggcgcggtaacgtaatcctgctgcggcgggcgttgccaaaagatggccagcgcgacggcgacggcgatgaaaacgatggcggcgagcaacgccagacggcgggaggggagtttcagtgatgacatacccaggttttccataacgataaaagcggcggttccagtctgccatcatggcagcgccagcttgaactggcgctaaacgtgaggcgctttcccgctggaaaggaaatagtaaaggctttcccgttaaagatcacggtgagttattatccgccgggtgtgcaaccggctgcagggcgcgttatactggctaaaaaaccagtattcattcatcagcaggataatgccaccgccatgatgccaaaccgcctcgagccggaactcgacatttatcaatacccggagcacctgcgcgcctgcctggcgccgttgcctaaagggccgggcgtgtatgtgtttcacggtcaaagcgagagcctgccgctttacatcggtaaaagcgtcaatatacgcagccgggtgatggcgcacttccgcgcgcaggacgaggctaaaatgctgcgccaaactcgacgcatcagctttatcgagaccgccggtgagttgggcgcattgctgctggaggcgcagttgatcaaacaacaacagccgctgttcaacaaacgtctgcggcgctcgaaacagctttgcgcgctgcgcttgcaggcagatgcggtgacgattgctcacgccaaagagatcgacttcgccgtcacgcccgatctctacgggctgtttgccaatcgccacgccgcgctggaaaagctgcgcgccatcgccgacgagcatcgtttatgttacggcaagctggggatcgacaagctgcccgccgggcgagcctgtttccgttacagcctgcgcaagtgcgccggcgcctgctgtggcgtggagtcggcgcaggaacatgctctgcggcttagcgcggcgcttgaacagttgcgcatcgcctgttggccgttcgccgggcgcgtggcgctggaggagcagggcgagacgctgcgtcagtaccatgtgatccacaattggttttatctgggctcggtcggcaatctggcgcaggcgaagttgctgcagagcgcggccagccactttgacagcgatggctacaagattctgtgcaagccgctcatggccggcgattatcggattattgcgctgccgtaatgccataacgctatcgataacctaagacttatctgtaaattcagggcattatgctaaaaaagcttgagtccataatgttgttatggataatggcaccccgaagcgaaggaacgcgctattaactcagttggcagagtgattggttttataatggcttgttttggcttgaaaattgatagacgcgggttcgagtcctgcatagcgcgccagctttctttccttcatctcaccgcgcttatcgtaaagcgcacccgggttgatttgcactatcggctcctcgttgggattttcgggtgtgctttaccgtaaccgctggctttccttcctctttctctttcgatcctttgctaaactgtaatcaggcaggcttgctgcccggcaacaggaggtcgatatgtctcactccgagcaactgcaggagctcttgcaacgcgtcgccgcccttgaggcgagggagaaagcgctgagcgccgcgtccaacgcttaccaggcgattatcaccaccatgttgggcaatatggagaaggtcgaacgtgaccggatcatcgccatgatcgatcaggcccatgaaatcgcctacgctcgcgccattcaacgcagcaacgaaccgcaaaagcaaaaaatcaaacaggccgacgacgtcgcccagcgcatgttcatgtttgcgcaaggcaaagccgctcagccgcgctgaagccgaactataacagttgccgccattaagttggctaactgatctacccggcaaaactgtacttgtgttacttttagcggtgagatttgatggcaatgctgtttccagcataaggttgtaacgatggacgcgattaaaagcatcttggttaaagagattgaacagatcaatcggcgcgaggggcgcgacggcaagccgcgtttcaacagcgaattcgcccgcactcaccgctatttgtgccttgccatgttcgccggttacttcgcggtgatcgccgtgatgtatcaggtgccgtatatggggatgtatgccttcctgggcttcaccgctttcgtgctgttcatgttcgccatgctgctgatcgagatccggccggtgtatcgtttcgaggacatcggggtgctggatttgcgggtttgctacaacggcgaatggtacttcacccgcgcgctgtcgccttatgcggtgcagcagctgctggatgagccgtccatcggcgccgcgctgaaacagaagatgcgaatcatcatcggcaacaagggcgaaatcgatttctacgacgtgtacgacatggcctacggaaaaaagccgcaggatgaaccgtctcagctggcggcggcgaactgaaaggtttccggccggcggcttgtcgattatactcagcgtttgaacgcgaagcagaatgaggaccaagcgatgagtgatgatattttcgattttgatatcgatgccgaactggcgaaagccgaagaaaaagcggcgcagaaggtaaaagaggtccccgagttcctcgaagacgaagcggactgcgaaggttgcaagatctgattgcctgccccataaaaaaaaccgccgcggcggttttttttatgtctgagcgtcgcgcggcgtcaatccagcacgaatccccagatcaggaacgccgccaccagaatcaggcaaagcgcggacaccgtcaccagtattttccccagaatgtctttttcttgttcctgctgcgtcacgttgaaattatccaattaaaagtctatggaccaaaccggcgatgccgagatcgagcgccgctacgcccagcgccatgatcactatcaccgaaagaaatcgagtcttgccgttcacttccctagtccctatcggcgccgttatatcaaagggatataatttggcggcgccgtactgcatacatcgtgatagagattaagagcgttcttaaggccagaagttccctcatctggtaggccggcgcctgagcggcagcgttagtcggtcacgatccgcacgcctatcttgctgacttgattgccgtccatttcggcgatggtccaggtcagaccgtcccattccacctggtcgccgatcaccggttcaccgccgatcagctgaatgacgaactgccccagcgtctgctgctcgtcgacgtcgtcttgcagattgagaccataaacctgcgagatgtcgcttaaacgggcgtcggattgcaggataaagtcgccgaagaagcgttcgtcgagcgtcacggccggcgcctggctgaacagcttgccgaggatcggcagatcgtgctcatggccgatgacgcacagaatatcgttctcccgcagccgggtactgccgctaggatggagcagctctttgccacggaacagggcggcgatgcgggtattgggcggcattttcagctcacgcagcgccgcgccgacgcaccagttttccgccgaaagctgatacacgaactgttcccactggttctccgggtgcacgtccagcccaacgcgggagatcggcgtcagcgccggcggcacgatcaccttggcttttttggcggcgaacgacagtgtggtgccctgcagcagcagggagaccagcaccacgaagaacgccacgttgaagaacagctgggcgttgggcagcccggccatcatcgggaacaccgccaggatcaccggcaccgcgccgcgcaggccgacccaggaaataaagccgcgctcgcgcagggtaaagctgcggaacggcagcaggccgataaacaccgacagcgggcgggcgaacaggatcatccacagcgacagcagcagggcagggatggcgatcggcagcagctcgtgcgggttaagcagcagcccgagcaccaggaacatgccgatctggctgagccaggcgaggccatcgaaggtttgtacgatgccgtgacggttgcggatcggccggttgcccagcagcaggccgcacagatacaccgccagaatgccgctgccgtccagcgcggtggtcagcgcgaaaataagaataccgccgcttaccgccagcagcggatagaggccgtccgccagtttgatgtggttgatcagcgtcaggagcagccagccgccgcccagaccgaagacgatgcccatgccgaactgctgcatcagatgcagcgggaaggtccagctcagtgcggtttccccggcggcgatcatcgcaatcagcgtgatggtgagaaacaccgccatcggatcgttgctgccggattcgatctccagcgtggcgctgacgcgttcgttcaaacctttgccccccaaaagagagaagaccgcggcggcgtcggtggaaccgatgatggcgccgatcagcagcccctgcagcagatcgagattgaacagccaggcggcggccatgccggtcaggccggcggtgatcactacgccgacggtggcgagagagagtgccggccacagggcgacgcggaaagagctgacccgggtacgcatgccgccgtcgagcaggatcaccgccaacgcgaggttgctgaccagataagcgaccgggtaattgctgaagacgatgccgccggggccatcgacgccggccagcatgccgatcgccaggaagatcaccaggatcggaatgccgagccgggaagaaaatgagctgagcagaatgcttgcccccaccagcacggcaccgatgacgaacaaactgttaatggtgctggcatccaaaatatcgctctcctgaggctgggggataggggcactgcgctggtgtcgatgataacgtgtttagtgggtaaaacgccaaggctgattgcgaaaacaaccgatcaattattgccctttggtgcgattaaccgaataaagtgaggggaagagggagaatgctgtcttttatccaacattatcaggctgctgtatttctgctttggcaacaatgcccgatcgtggctgagggaaaaaccattaagcccgcgccggcaggcttaatggtttgcaggcgcggtaggattaatgatcgagcgattccagcgcccgtttgatcagctcggtggccagcttgctttccgcttcggaaatgccgtcgagattgaagttggaaagctcagcgaccaaaacgctgcgttctttgccgctgatcgaagcgtccagcgcggacagcaacctgccgaggatcttcagcagggtggcgttttccgctatggcttcttgagctggggtgttcttatcggtcattcaaaatcctctctgtcgtgacggaagggagatgcagctaacgccaccgaataaattaaacgatcgcgcagcccttcgggggtgttgagcccaatcactaccgtaaggcagggatccggatttctacttatgcattgcagttataacggctaggttatctatgcagccgtatcactttgccttaacggtcgacgccaggctgagcaatgtgtgctctgtatgcaaaccaccagtataggctttttacgcggcggcaatatgacagaagccccctgcaaacggtcgggtttacaggggaaaggttattgcggtttgccggagaacaggaagcgcagcaccggaatgcgcttgtgcagttcatatagcgcgaaggccagagagaacacaaacagcaggcccagcaagaatcccaacaggttgttgccgatatacggcgtcacgaaagcgccatatatcagggttaacggatggtgcaccagatatataaacagcgaggcgttgaccagataggtgatgcgcggcgagtgataattcagcaggttatgcccgaaagagaacacgacgttggtcatcaggatccccattagggttttgatcaccacttccagctcgaacatatagctgctgtgcgccaacagcttttggttaagcatatatgcgataaacagcagcagcgaaccgagcagtgccagcggcgagcggcgcagaaaaatctccttaagccacacatacttaaacgcataggcgccgaggaggaagaacggcaggtagaacatcgtctccatcaccacgaaattgaacaggccgttggataatagctgcggggcgaaaattaaaataatgcggtgcgcggccgaatagcataccgcataaataaagaaatacagtgagatgtttcctaatccacgcattctgtttattagcgttggaatatattcacgggtttgacgcttgattttacggaacagataaaaacaggcgcaggttaacaatgacagcgtcaataagaaccacagatgagaaaccaattcccaaactgttacatttattttctgatagagagaaaattcatcccagccgtttaatttgtcggtgaaatatttcagcatgaaaaactgcggcaccgtgatcagcgggatggagctcaacagcgggatcgccacccgctccagcctgaccttcagccactggtggcgctcgtagcgctcgtaaagcatgtaggagaagtagccggatatcacgaagaacacctgcatgcggaaggcgtggatgaagtcgttcagcaccgtgagcgagaaggagggcgaagcgctgttcaccgcccaggcgtggctggaataaatcagggagaggtgaaacgggatgccgagcaacatcaaataggctctgatggagtcgaggaaaaactcgcgctgtttgctgcctttagtcatagattaccgctggtgatttaatcgagagttcattaacacgcttaataagtcgtcaaacgttaaattgttatccggaaccctactatagccccccgcatttttccatagcgtcttgttgcgcggcttgctacgctggtgttccatcagctgcttaaacaatgagccgtaaacatgaaccatccatttatcatgttgtcggaaagctgagtaatccattaatatggatttaaatgctttgagcacacgaatagggggggatgtgctagttaatatattatccggacaaccacgcgccgcgagcgttcgttggttaggtgcgaccgtattgttcacgctgttcagttcgccggcttgggccttttctattgatgatgtcgccaagcaggcgcaggatctggcggcgaaaggtttcgaagccccgaagagcaaccttccttctcagttccgcgagatgaagttcgcagactatcagcaaattcagttcaatcacgataaagcctattggagcaagctgaaaacccctttcaagcttgagttttatcatcaggggatgtacttcgatacgccggtgaaaatcaacgaagtcacctccaccagcgtaaaacagatcaagtacagcccggattacttcaacttcggttcggtcaaacacgaccctgaatcggtgaaaaacctcggctttgccggttttaaggtgctttatccgatcaacagcgccgacaaaaacgatgagatcatgagcctgctgggcgcgagctatttccgcgtggtgggtaaaggacaggtttacgggctttccgctcgcggcctggctatcgacaccgctttgccgtccggcgaagagttcccgcgtttccgcgaattctgggttgagcgtccgaagcagggcgacaagcacctggtgatttatgcgctgctggattccccgcgcgccaccggcgcttaccgtttcacggtgatcccgggccgcgacaccaccgtggacgtcgagtctaaagtgttcctgcgcgacaaggtgggcaaactgggcctggcgccgctgaccagcatgtacctgttcgggccgaaccagccgtcgccgacgctgaactaccgcccggcgttgcacgattccaacggtctgtctatccacgccggcaacggcgagtggatctggcgtccgctgaacaatcctaaacacctgtccgtcagcacctataccgtcgagaatccgaaaggcttcggtctgctgcagcgcggccgcaacttcaaggattacgaagatctggacgatcgctacgatctgcgcccgagcgcctggatcgaaccgaagggcgactggggcaaaggcaaggtcgaactggtggagatcccgacggcggatgaaaccaacgacaacatcgtcgcgttctggacgccggataccttgccggaagccaaaaagccgctgacgctgagctaccgtttgaacttcacccgcgatgaagacaaactgcattcgcaagatatcgcctatgtggcccgtaccatgcgttcgaccggcgacgtgaagcagtccaacctgatccgcgagccagacggcagcgtggccttcctggtcgacttcgttggcccggtgctgaaagggctggacgccaataccccggtcgcttctcagatcagcatcggcgacaacggtgagatggtagaaaacaacgtccgctataacccagtgaccaaaggctggcgcctgacggtgcgtctgaaagtgaaagacgacaagaagccggtagaaatgcgtgcggcgctggtcaatggcgataagactctgtcggaaacctggagctatcagctacctgccaatgaataagcctactcaacccgcccaggattatcttgcggcgctgcctctgaccgccgagcggtcggaggcgctcaaccctcaaacggcggatggcgctcaggcactggaggcgctccatcggcagatgggcgccgccgacgccaacgttaatagcctgtcggcggatgacgtggcgctggcctcggtcaaaccgcgtatcgaaaacgcctggccggatgcggtcagcgatgacgacttcgataccgacgccgaagggcgcgccattctgaaggcgacgccgccgatcaaacgcaccaccatgttcccggaagcctggcgcaccaacccggtggcgcgcttctgggattctctgctggggcggtcgccgcacaatcggcacgccaccaaagaggaggccgaggccgagaaccgctggcgtaccgtcggctccatgcgccgctatgtgctgctggtgctgatgctggtgcaaaccggcatcgccacctggtacatgaaaaccatcttgccttatcagggctgggcgctgatcgatcctatcgccatgctggatcaggacctgatgcagtcggtgttgcagctgctgccgtatgtgctgcaaaccggcattctgatcctgttcgccgtactgttctgctgggtctcggccggtttctggaccgcgctgatgggcttcctgcaactgctgatcggcaaggacaaatacagcatttcctccaccatcaagggcgatgagccgatcaacccggcgcaccgcactgcgctgatcatgccgatctgcaacgaagacgtcgaacgcgtgttcgccggcctgcgtgcgacctatgagtccgtcgccgcgaccggtcagctggaacacttcgatatctacgtgctgagcgacagctacgatccggacatctgcgtggccgagcaaaaagcgtggatggagctgtgccgcgatgtcgatggccacggccgcatcttctatcgccgccgccgccgccgcgtcaaacgcaagagtggcaacatcgacgacttctgccgccgctggggcggtgagtacagctacatggtgatcctggatgccgacagcgtgatgagcggcgaatgcctcaccgggctggtgcgcctgatggaagccaacccgaacgccggcatcatccagtcggcgccgaaggcgtccggcatggataccctgtatgcgcgcgtgcagcagttcgccacccgcgtttacgggccgttgttcaccgctggcctgcatttctggcagctgggcgagtcgcactactgggggcacaacgccatcatccgcgtgaagccgtttatcgagcactgtgcgctggcgccgctgccgggcgagggctctttcgccgggtctatcctgtcgcacgacttcgttgaagcggcgctgatgcgccgcgccggctggggcgtgtggatcgcttacgatctgccgggcagttatgaagagctgccgccaaacctgctggacgagctgaagcgcgaccgtcgctggtgtcacggcaacctgatgaacttccgcctgttcctggtgaaaggcatgcacccggtgcaccgcgcggtgttccttaccggtgtcatgtcctacctgtcggcgccgctgtggtttatgttcctggcgctctccaccgcattgcaggtggtgcatacgctgatggagccgcaatacttcctgcagccacggcagctgttcccggtctggccgcagtggcggcccgagctggcgatagcgctgttctccaccacgctggtgctgctgttcctgccgaagttgctcagtattgtgctgatctgggccaagggcgcgaaagaatacggcggggcgttccgtctgttcatttcgatgctgatggaaatgctgttctcggtgctgctggcgccggtgcgcatgctgttccataccgtgttcgtggtgagcgccttccttggttgggaagtggtgtggaattcgccgcagcgtgacgacgacgacacgccgtggggcgaagcgttccgccgccatggctcgcagatgttgctgggcctggtgtgggccggcggcatggcgtggctggatctgcgcttcctgtggtggttggcgccgatcgtgttctcgctgatcctgtcgccgtttgtgtctgtgttgtcgagccgcgcaacgctgggcatgaaaagcaaacgcgccaagctgttcctgatcccggaagagtacaatccgccgcgtgagctgttggcgacggaagaatatctgcatctcaaccgcaaccgcgcgctgaccaacggctttatgcatgcggtggtcaatccatccttcaacgcgctggcgacggcgttggcgacggcgcgtcaccatctgcgcgcgacgctcgatcgcaatcgtgaggagcgggtgaacgaagcgctgcagttggggcctgagaagctggtgaagggcaaacgtctggagctgctgagtgatccggtcacgctggctcgtttgcatcaacgcgtctggctgttgccggaaggcgccgcctggcgtgagcattatcagcagttgccgcacaacccgctggcgcaccctacgggccggcgttaattgctaatcggcaacgctcagacggggaatgcgcatggcgcattccccgttttttttacctttcgcttacgtgcgccggtgccggtggagaaagagaactgtgatagactgcggccgatgcgttgttcactcgcgaaacaaccccttgctcagagtcaatgtcgtgaagctctcttcctatcttcggctggcctgcgtggcggccggtgtgatggcactcaccggctgcggcagcattatcagccgcaccgtgcccggtgcggggcatggccaccagtactatcccggcgtgcagtgggatctgcgtgacacgccctggcgctacgtcacggtgatagacgtcccgctgtcgatggtggtggacacctttatgctgccgtttgatgcgcagcatggcccctacgagtaatttcgtttagcgggtggcgaacaccaccagctgatagctttgctgcccgcaatggaaaggcgccagcgccgtcatccccaacccttgcacgtgagcggccaacgaatgcggattgtcgtcgtcgataaacaacgcgcctacgtcatagtcatggcaggtatgcgctttgaccgcggcgtagaggcgcttcagcacgcctttgccacgccaggcggcggcgaggcagaccgggccgtagagaaacacccgctgctcactcagcggccgtccggcgaaggattgcgtggcgagcgtcaccagcatcgcctccaccaccggcggccgcggctgcgcgtcggcgggcatcaggcaaacaaaccccgccagttggttctcctgttcggccacccatatgccgatgccgcggttgatcgccgccagctgcgcctcattcatgcgcgatacgataaatccctgccgtttttggcgctcgtcgagcgcttccggcacgttttccccctgtagctgcaaaatggcggggtagtcggtagggcgggcccggcgaataatcatgcggcctccttggcgatgaaagcgtggtgcgggttaacgttcatcccactcatcggcggcggcctggccttcttcggtatccagcggcggctcgagctgaaagtcgccttcctcccattcgtaaagggtgttttcatctatccactcggcggtaatttccacctcgtcgtagtcaccgtcgaagatcgcctgcgccgccgcaccgctgcgcagcgtcagacattctaccgcctcgccttcttcttcgaagaactccgcctgccacatcgtgtcgccatcctgcattacgtacttttgcagattgaactgctggggcaccggcggttcgtcaccgccgccgccttcggcggtgtcgagaaactcttcgcgtgcggcctcgatggcttcttccagggttgcatacaggctcatgttcgcctccgttgacaatgagagtaaagcgtccggcgtgctgccggcgcggtgggggaaacgtcaaaactaattgttgtctcactggcgcaggatgcaaatttttttgttgtccgctttgcgacgatggttgtccgcaaagcgggagaagaggaggcgatggcgggaaataatgacgcgatcgttcactctggcgtcaggagaagcccatgttaatcgacccttcaagcaaataccgacctttcccgccggtggcgttgccggaccgccaatggcctgcgcgtacgctgcggcaggcgccgcgctggtgctccagcgatctgcgcgacggcaaccaggcgctggcggagccgatggataacgcgcgcaagcgcgaattctatcaattgttgttgcagtgtggtttcaaagagatcgaggtggcgttcccttcggcgtcgcaaacggattttgactttgtacgcgcgctgatcgacgagcggctgatcccggacgacgttacgatccaggtgctgacgcagtcacgtgacgatctgatcgatcgcaccttcgaggcgctgcagggggcgccgcgggctatcgtgcatctgtataacgccacggcgccgatgtttcgcgatatcgtgttccgccaggataaggcggcgaccgtggcgctggcggtgaacggcgcgcggcgcattcgccggcagtgcgaggcgcagcccgataccgcctggtgcttcgaatattcgccggaaaccttctgttttactgagttagagtttgcgctggagatctgcgaagcggtagcggaggtttggcagccggggccgcagcggccgatgatcatcaacctgccggcgacggtggaagtgagcacgcccaacgtgtatgccgatcagatcgaatggttctgccgtcacttcagccgccgcgccgatgtggcgatcagcgttcatccgcataacgatcgcggcaccggcgtggcctgtgcggagctggccttgctggccggtgccgatcgggtcgaaggctgcctgttcggcaacggagagcgcaccggcaacgtcgatctggtcacgctggcgttgaatctctatacccagggcgtggcgccgggtctcgacttcagccgcctgaagcaggtggtggaggtggtggagcagtgcaatcagctgccggtgcatcctcgccatccttatgccggcgagttggtgtttaccgccttctccggttcgcatcaggatgcgatcaagaaaggtttcgccgcacagcggcagcggcaagatggccgctggcaggtgccatacctgccgctcgatcccgccgatgtcggttgcagctatgaggcggtgatccgggtcaacagccagtccggcaaaagcggcgccgcctggctgttggagcagaatcatgggctggcgttgccgcgtggtttgcagattgatttcagccaggtggtgcagcgcgcgaccgacgatagcggcaaagaaatgagcggcgcgcagctgtggcgcttattccgcgatacttacgggctggtggagcagccgcgtttgcagctgttaagctaccagacggaaagccatggggtagaggcctacagcttcaacgcgcgagttgcctgcgagggagagccgctgcgcctgcagggggccggcaacggtctgctgtccagcgcggtggatgcactgcgtcagcgcttcggcttgccgctggcgatcgaggattaccacgagcatacgttggggcatcagagcgatagccgagcggtggcctatattcgctgtacgctgccgcaaggtgaggcgacttatggcgttggcatcgacgtcgactccgccagcgcctcgctgcaggcgctgttcaacgtcgccgggcgctatctggcgccaacgtcggcgcagtccggctgaaatagtcgctgggtgctactcccagcagcctgcggaacatggcgctgaacgcgctggggctgtcatagccgagatccagcgccacttccaacaccgagcggccggtcgccagcgcgtttaatgccgccagcaaacgggcgcgtcgcacccagtcgctaaaatgtagcccggtttctcgcaggaagcgtcgcgacagggtgcgtccgctgacgctgagatgagcggcagcctgttccagcgtccagggctgcgccagcgtggcctggatgtggcggcacagggcgagcaacgaggcttcgcgaggttccggcaggtgcagcggcaggatcggcagcattcgcaactcatccagaatcagttccatcacgcgctcatcgcgcccgccgctggggtaaccgggcgcaatctccatcgcacagataatcaactcgcgcagcagcggggaaacctgcactacctggcattgggccggcagatcggcgcgcgccaacggatcgacgaacaacgtcctggccgccacctggccggtgatacgcaggctgtgcaccactttcgccggcacccagacgccgcggccgggcggcaccacccagctgccgagccgggtcgtgacctgcaccacgccgctcaggctgtggatcagctgcgcgcagttatggtagtggtccggctcgctgtcgccgtggcgataatccctggctaatggctggacaggccgatcgggcggcagaacgtcgtgaaaaaacagcatcgtaagcaggctccgcgcggcaaaagggggaggacagcatgccatgcgtcgctgtttcacaccagtctgtggcgcggcacggtaaaatggtttataaaattatattatatgattttataaactgatggagaggcaatggatattgatgcgatgcgcaaggcggcggcgcaggccggtgcgatgctgcgtaccctgggcaacgaagatcggctgctgctgctgtgccggctcagtcagggcgagatggcggtgagcgaactggcgcaggcgctggatatccgccagccgacgctgtcccaacagcttggcgtgctgcgcgaggaggggttggtctccacccggcgagccggcaagcagatttactatgcggtggccgatgccaaagcgctggcgctgctcgcgaccctgtatcaactgtattgcccacagccggagaaccgcgatgaccattgactggcagcacttcacgccgtattccgcgttgacgggcggggccattatcggcggcgcggtagcgctgctgctgttgttcaacggccggatcgccggtatcagtggcattaccggcggtttattgagcgcggccggccgggagcggggctggcgcgccgcatttattggcgggttgctgctctccccgtggctatatgctgccgctgcgacgttgccatccggtgagatctcggttggcagcggctggctggcggccgcagggctgttggtgggcttgggtactcgattgggcagcggttgcaccagcgggcacggcgtgtgcggtgtcgcgcggttggcgccgcgttcactggccgccacggcgttgtttatgctgctgggctttatgaccgtgtggctgatgcgccacacgttgggggggtgaaaatgcttaaaacgctgttggcgctgctgagcggcgtgattttcggtctggggttaattattgctggcatggccaatccggccaaggtgttggcgtttctcgacgttaccggccagtgggatccctcgttggcgctggtgatggctggggcaatcgcggtggcgacgccggccttcctgtgggcgcggcgacgcgagcggagcctgttgggcgagccgctgcagatcccggccgccgggcgtgtggatcgccgtttgttggcgggctgcgcgctgtttggcatcggctggggcatcgcggggatttgccccggcccggcctgggtgttggcgggggcggagatgcagcgggtgtggccgttcctgttggcgatgctggcgggtatggcgctgtatgaaattatcatgaggcggaggcgtacatgtcgatagccaaagcggtgttgcgcatcgcgcgcccgacagatcggttgcaagagattgccgcgctgtattgccgtgggctggggttcgaaaggctgggcgagtttgtcgatcatctgggctttgacggcattatgatcgggcatccgcagcatgcttaccatctggagtttacgcagcatcgtggggtgcaggttggacaagcgccgacgcaggatcacctgctggtgttttatctgccggatgagaacgaatggcgagccgcgtgtgagcgtatgcgggcggcggggttcttggcggtcgccgcctataacccctattgggatcgggcggggcaaacctttgaagatcctgatggctaccgggtggtattgcaacaccaggcctggcaggcataaaaaaaccggcgcatcgagcgccggtttgcgagataaaacggtttatccgtcaggcgctggtcgccggcttttgtgcgctcttggaatgggtattttccagcatgcggcgaatcggcacgatcagcacgataagcacggcggcgcagattagcaacgcgactgagcagcgggcgaacagatccggcagcatatccagttggtcggccttgacgtgaccgccgatcagaccggccgccaggttgcccagcgcactggcgcagaaccacagccccatcatctgaccgcgcattctctccggcgccagcagcgtcatggtggccagcccgatcgggctcaggcacagctcacccagcgtcagcatcaggatactgcccaccagccacatcggcgatacgccggtgccgccgttgctcagcacattctgcgcggccaacatcatcaggccgaaaccgccggcggcgcacaggatgccgatcacgaacttggtgatgctgctcggacgcacgttattgcgtgccagcgcaggccaggcccagctgaacaccggcgccagcaggatgatgaacagggcgttgatcgactggaaccacaccgccgggatctcgaagccgccaatcatgcgattggtgtaatcgttggcgaacaggttgaacgaggtcggtttttgctcaaacgccgaccagaagaacgcagcggagatcagcaggatgaagcacaccagcaggcgtgcgcgctctttgcggctcaggccggcaaaggcgaacagatagatgaagtacagggtgaccgacgcagcgatcacgtacaccagcatgctggccacttcgaccggattgatgacgatggtgccctgagcgatcagcacgatgacggccaccaggatgaccgccagcgccagcaaccaggcgccgacgccttttttcttcgctaccgggctgttccaggtggagtccaggcccacttcgcggtcatagcgtttcatcgccgggacggcgaacacccggaagatcaccagcgccaccagcatcccgataccgccgatgccgaagccccagtgccaaccgtgtgacttgatcagccaaccggagatcagcggagcgatgaacgagccgatgttgatgcccatgtagaacagcgagaaaccgccatcgcggcgcgcatcgccttttttgtacagcgtgccgaccatcaccgagatacaggtcttgaacaggccggaaccgagcacgatgaacatcaggccgatgaagaacaggttggtgcccatcaccgcggacagggcgatcgacaggtggccgagcgcgatcaggatcgaaccgtaccagacggccttgcgttggccgagccagttgtccgccagccagccgcccggcagtgccgccaggtacatgctgccggcgaagatgccgacgatcgccgacgcgttctcgcgcgcgagacccagaccgccgtcgtacacggtggcggccataaacaggatcagcagcggccggatgccgtagaacgagaaacgctcccacatttcggtgaagaacagagaacccagcggatagggatggccgaagaaggtccggctttctgacttattgacagaggattgcataacgatttcccaataaaaggcgctgcaaggctgcagcccgtactgtggtatgtatgtgtatttaataaaggcgatccgcccaatgcggattacccgacaaacaccgtggctgcaacgctgataaaccgtggaaagcgtgctgaccttttcttcacttggccgatgtttcacatctggcgtgatattatttaaccatttgataactggtcgttggttttgtctagtacctgtatcccattttttagacgaaaagtcgacaagcatctccttttctggtttttctgttggttgtgacaggaatatgattgacagcgggttttatgtgctgaaagttatttttttgttgataaacaaaatgttgagataagaaagttctgggtgggacgaaaattcgccggcccgaaggaggcattattaaaagtgggggaaatgcgccgttgatccggccaacggaggaagctggcgataaatgcagctattgttcttcctgcagcgtgtcttcccgcaaatagcccggccgccgccgcagacaccaccaggaataaccggcgttgaacagcaccactaaagcggtgacggcgaagaccgcgcgaaaaccgtagccggcggagaccgcagcgccgagcagcggaccgctgacgttgccgacgtcgcggaacgattggttgtagctgaagattcggccggctacctgattggtgcagttgtaaatcaacagcgtctgtaccgccggcagcagcgctccgtcggccgcccccagcagaaaacgcagcaccccgagctgccacggcgtttgcacgaacgccatcgggatcagcagcagcaccgagacgatcagcataaacaccagaatgcgctccgggccgatgcgatcgcccagcttgcccaaccgtggggcgctcatcaaggccgcgacgccgggcaccgaggcaatcagcccgctgataaacgccaggttatgggtggcgccggccagatcgcgcacatacagcgtcaggatcggtgcgatcgagccggtggcgatctggatgatcatggtggtcacgaacaggctgagcaccagcttcgggttcttcagcgaggcgaacacctgttttgcgtgcagcatgtcgcgcttttgcaccggggtgaattgctctttgacatacagcagcgtcagcacgaagcagacgaacagcaccgcggcggtgatataaaacaccgggcgcagcccgtacagatcggccagcaaaccgccgatcagcgggccgaccagcgcgccgccgacgccgccggttgacagggtgcccagcgcccagccgctgcggttgcgcggcacctgggtggcgatcagcgcgttggcgttggggatgaacccgccgagcagccccagcaccgcgcgcagcgcgagaaactgccagaccgtttgcgccatgcccatcagcaccatgacgatcgccatgcccagggcggagcgcagcagcatcagtttacggccgcgtcggtcggccagggcgccccaaaacggcgcggcgatagcggaaaacaggaaggtgatgctgaacagcagaccggaccacatgttgagcgcctgatggccggttacgcccagcgtctctacgtacagcggaagaaacggcatcaccaggctgaaggcggcgccggtgagaaaacacccgacccaggcgacgaaaaggttgcgtttccagttaacgggttctgctgccgaagccataaatgtccactgtagaagggtgacgcgctttgccggtggcgagatgaaggggcaaaacgtgaaagttagcctgataagtatgcgccgcctgcgtggcaacggcaaaccagaggacggaaatagggcgaaaaatgaaataaagttttaaaaatggcgtttaaaccttattccgcgcttagcgcgcggaatttacagcgttttataagccggccagcgcctcgaaaccggcggcggtggtggtcgcgctaaagtcgatgacctcgtagtgggccacggcgttgaatggatcttcggccaggatggcgtccagctgcgcacgctcaatgcccttggccaggatcacgccgccggtgcggggattcttgcggccggaagcgacgaaggtgccgtcctgaaaatatttcttaagccaggcgatgtgcccgtcaaggtggctgtcgacgtcggcgatcgggcgatggtaggtcaggctgacaatgtacatagcggctcctggggtgtcggcaaaggcattaccatcccaccctcgccggcgattctcaagaggcacgcaataaaaaacccgccgacggcgggttggtttaatcagtaaagcgaaggctcgccttccggacgggtcttgaagcggcgatgcagccacatgtattggtccggcgccatcaggatctctttttccaccactttattcatgaaggcggcggcgtcgagttcattatccagcgggaagttttccaccgccggctgcatgatcagctcataccctttgccgtccggcaggcgacgcggggtgaacggaatgatcgccggtttacccattcgcaccagcacatagctgccggtggtggtggcggctttgtccacggcgaacagcggcacgaaaacgctgctgcgcgggccgtagtcgtgatccggcgcataccagatgatatcgccctgtttcagggcacggatcatgcctttgacgtccttgcgatccagcatcgacttgttggaacgcatgcgtccccaagtttgcagccagtccatcagcttgttgtcgtgcgggcggtaaacgccgatgcccgggttgtgaatgccgaagatgcgcgcgcccagctccagcgtcaaaaagtgcaggccaatcagcagcacgccctgctggttgtcgcgcgctttttggatatgctccaggccgctgaccttgaaccagcgctcgatgcgccagttgggccagaaccacgccatgccggtttcaaacagccccatgccgaccgattcgaaattctttaccaccagcgcatcgcgttcggcctgcggcatgtcgggaaaacagagctcgaggttgcgttgggcgatagcgacgcgccgcttgagaaagcgcatggaaaatcgcccaatcgaggtgccgagccagtagatgacggggtaaggcagcaacaccagcagatacagcaagccgatgccgacccaggtcagccagtagcgcgggtgcaataaggagcgattgaaagtaggaacttgagtcatgggttctctgtttgaatacggttgtttaagtgtaatgacagcgtcatcgcacggtctggcagccgggtgaactcggcggcaaggttcgtttctgccgtttgtttgcgactattgtggcatttttctggcgatccgggaaaacacaacgcattaaaatcccttttggggcgttaaatatgcatcgaatgccgaatttttccacaatctttcctgccaaagataatggcgatattattgtcggtaattatttagagggtaaatatgttggcatcatggatcagtgcggggctgctggtgttgggtgcggcggtcggcagcgtcggcgcacatctgcagatgaacgcgatattggcgctggccggcgtaatgatggcgctcggtatggtggcctccgcgtttaccgaaggcggcgggcgctgaacggggcgctgcgccagggctgcgcggcggtggtttttcgggtatgatgtgcgccgcgcgtgggcctgctggctgcgcgcggtaatcagtcacctcccgaaagacaggaaagtacaccatgccagtgttacataaccgaatttctaatgaggaactgaaggcgcgcatgctggcggaaaccgagccgcgcaccacagtttctttttacaaatacttctccatcgacgatcccaaggcgtttcgcgacagcctgtacgttcagtttgaaaaactgaaggtgtttggccgcatctacgtggcgaaagagggcatcaacgcgcagatcagcgtgcctcagcataacttcgacgcgttcaaagccgcgctgttcgcctcgcacccggcgctggatcaggtacgcctgaatatcgcgctcgaagacgacggcaaatccttctgggtgctgcgcctcaaggtgcgtgagcgtatcgtggccgacggcatcgatgacgaaagtttcgatccgagcaacgtcggcgagtatctgcaggccgagcgcgtcaatcagatgatcgacgatccgaatacggtatttgtcgatatgcgcaaccactatgagtacgaagtcggccacttcgaaaacgccatcgaggtgccgtcggataccttccgcgatcagttgccgatggcggtggagatgctgcaggacagcaaagacaagaatatcgtcatgtactgtaccggcggcattcgctgtgaaaaagccagcgcctatatgctgcacaacggttttaaaaacatctaccacgtggaaggcgggatcatcgaatacacccgcaaagcgaaagaacaggggttgccgctgaagtttatcggcaaaaacttcgtgttcgatgagcgcatgggcgagcgcatctccgacgatgtgatcgccaactgccaccagtgcggagcgccgtgcgacactcataccaactgcaagaacgacggctgccatctgctgttcattcagtgcccgagctgcgccgccaagtttgaaggatgctgcagcgagatttgccgcgaagagctgaagctgccgcgcgaagagcagcgcgcgcgccgtgccggccgtgaaaatggcgtcaagatcttcaataagtcgaaaggcttgctgcagaccacgatgcacattccggcaccggaagaagaaggcccagcccgctgagcctgaggaaatgagaagcccggccgccaagccgggcttttttttatttctcgcgcacgccttctacggagatgatcagctcaacgtcttgcgacgccgggcccagatcggtggtgatgccgaaatctttcagcttgatcttgccgttggcttcaaagccggcgcggtagccgccccacggatcgttgccctggccaatcagtttggcatcgagcgtaaccggtttggtgacgccgttcagcgtcaggttgccgaccaccgcataaccgtcgccgtttttcttcacttcggtggattcaaacttggcctgcttgttcttctccacgttgaggaattcggcgctgcgcaggtgcttgtcgcgctcggcatggttggtgtcgacgctggcggtattgatggtcacgttgaccttgtccttcgaaggatctttttcgtcgaaggtgaagccgccgtcgaagtctttaaagctgccgtacagccagctgtagcccagatgctggatgcggaactcgataaaggcgtgctggccctgtttgtcgatcttgtagtccgccgccagtgcggaaccggcgctcagcagcagggcgcctgcggtcaggcccaatacggtctttttcaacatagcaatctccataaatccaaaggttaatcggcgctgctacccagcatccgtttcaaagtgacatcacgatcgataaagtgatgtttaagcgcggccagcccgtgcagtaccgagagcactaccacggcccaggccaggtaaaggtgtatggcgccggcggtgtcggcctgttccgccatgccggtcacggtggcgggcacgttgaaccagccgaacacgctgatcggttgaccgtcggcggtggagatcagatagccgctgatcagaatgccgaacagcacgacgtacagcgccagatgcgcgaggatggcgctgacgcgagtgaggcggccatagctggccagaggtttgggcggcggtgagacaaagcgccagatcacgcggatcaccatcacgatgaacagcagcgtgccgatgcttttgtggatctccggcgcctggtgataccagacgtcgtaatagcccagcgtgaccatccacaggccgagcgcgaacatgccgtacaccgtcaacgccaccagccagtggatcaacactgacacatggccgaaacgatcggcggtatttttccagagcatcctgtttccttcgattaccgattggctggctgcaataattaaactttaggaaacataaaatcaataataaatttaactatgttacttcttagaaatattagtcagtgaatttgtttgagatgttcgtgaaccttcagataaatcgttgaagatgatattgtttctctcgcccggtgattgtgctagttgttgaaaattaggcttattatctattaatgtcagcttttgtcattttacgtaaacctcgcgtgagttgcccggtgagattatttgttggcaaaggttatgcctattttttgcggcgcagagcagggcggaaagattaacgttgtcgaacggtttcgctaaatcccctgcggtgcagcggcggattttgctaccattagcgccaagagacggccccatgaggccggttaacccagtgaaataacaaggaaacgtcatgggccgaacccgcgtgaccgacagcagcctgcgtctggccgtcctgctggcgatgttggtgatcattttggccggggtgaaagccgccgccgacatcgtggtgccgtttttgctggcggtatttctcgctatggtgttgaacccgctggtggcgatgctggaacgcaagcgggtgccgcgtatcgtcggggtgacgctgctgctgacggcggtgatcgtggtcgtgatgctgtttatcggcatgctgggtgcttcgctgaacgaattcgcccgctcgctgccgcagtaccgcggcatgatgatcgagaagctgcgcgagctgcagcattacgccgatcgcttcaatatcagcctctccagcgaagcgatgctgcagtatgtcgatcccagcgcggcgatgaatctggtcacccgcatgctggggcacctgtctggcgccatgaccaacgtcttgctattgagatatgatatacactattgaaaatgctcaatcggggtgaatagtgaaatcatatttatacagtagaatcagtacattacaacaatcagaaggttttggtatccaacgccagatcaacacagttactgactttctgtcttttgctgagattgatagccgtcttggtttctctctcgatccaagtaactatgaaatcttagaatcggacttgggtaaatcggcctttactgggagaaactggaaaccctctagtagccttggccgcttctatgaatctgtcatgagaagggagattatagagggaattctcatcgtagaaaatattgaccgacttacgcggcagtctaattatgaagctgcacgtaaactgattaacttgattactaatggtattactattattgaagttgaaagtggcatgtgcttcagtactaaaataccggaatcactttcaatattgaatatgagcatatcgcgtgctcatggtgaatcactacgcaagtctcgaatgataaagaaatcgtgggataacaaaaaagctaaattacttgaacaaggaatcgcacctagtaagaaagtaccgcgttggttaaaggtgatagacggtgcatatgtagttgatgaagtacttgcaacgttgtttagggaagcgtttgtactgtacgacaagggacacgggaatgctgcaattgttgcacgtttcaatagtgaaggaagactcaataatggtaagcaatggacaaccattaccatgcatcgtgtacttcgcgataaacggcttaatggaataatgacattcggtaaaaacactgatcgagataatgaagagctacatgtgtttccggtagtggttgagaatgagttattcaatcgagtacaagaaaaaatcaatggtaagactaagtatgatagaactacaaagagtcaaaaaaacctatttaaaggaatgttgaaatgttcattgtgtaaacaagcaatactaacaactactgatggttctcgtaatacacacgcaagatgtataggcagacgtgaccataaaaattgtactgcacgtggctttatatacataccatttgagcgtggtttgctccagtacatacgcggtataaattggagttctatttacaatagtggtgttgataatagtcaggcaattgagaactgtaatgtaaagattgcaactattgattttgaaattaatgaactatccgaagaacttaaaattgctgatgatgatgtagtactagcactggtaagaactatcaataataagaagaagactcgtaaaagtttaagtgatgaacttgaattgcttactcgggagttgccaaaagtagatttcgataatattaaagataacctacatgatcctagtaatgttaaagaaagacagcatgttaatattgaactgcaaaaagtagttaaagagataagagtacttagaatgagtgactatatttttgctaatataagttattatacatgtactgtgatacatatgattgcattggatatgaaaggcaacctgataactacttcttcaattgacgaaaatttaaggttccattccgactttattgaatgggatttgttgaacaataaaatggaagtgatcaatacctcatggactgatgttcaccaaatcctatgggatctttggagtgacattttcgatgaagcatttgagcaagcgaaagggatgtttgacggaaagcattgaaaatgagtataggaagcttgcagaggtgtttaaaggcaaaagacgaaccaattcgaaggatcagaacgcctcacagagcgttatacgcagcttgaagaaataaatctgaaaaaacgccaaaatccggctattatataggtagtcggattttttttcgtctgtcggtgaaacgacgagttattatgtggtataatataggcatctccactaaataagtgaaagtaacacttatggggataccacatgaaacaattctttaaagacacaatcatcttcggtattgggctatcaatggcagtacttacacttgcacatccaatactaattctatggttcattctcgttatatgggcattacgaggtgaacatgaaaaagcttaatctaataactgcatgtggattggtaaaaatactattccccgatctaccagagcatttagtactggtaaatgagattctacgattcttgcaagacaacaatttagaactgaccgaaggcattgaacaattcaacagtgtcttttggcctacgcttttcacgctttatgatgtgaagataataaatacagataatgaaagtacaattgcatttgtattccataatgaaaagcttggaattgcatttggtaacgtatttcattcaatttaataaatagtttaaatctccagagacaaagttaccgcaagtgacattgcggttcttttttgcaattaaaaaataataaaaggtgcacaaaaatgaaagaaaaaaagaacacgtcattcggtattagattgaatgaccgacaagttgaagtactggatggtctgattaacgatggaaaagcaaaaactagatcagcagcagtacaatatattatcaatcaatacattattcttggaggtgacaagaagtagtagtaggcagtaaaggggatcacacggacgttgcgatccaaatataaatggaatttgaaaatgggaaaacataaagaactagtagccgggattggcacgaatgacctgaaagatattaaaaaacaagaaaagatgggcttaacacctgaaattagagagaaatgctaccaagcgtggaagagtcgcctagaagcagaaacagtcgagaaaagagctactgtcagtactgaatggctcacgtacagtaaattcgctagctggtggcttgatactcgcatagaaggctggtgcatcgataaagattggctagtcgccggtaataaggaatatcatcctgataaatgcgtttggataccgaacaagattaacagcctgatgaatgacggtggtaagaataacggattaccgaagggtgtcagtatacaacaacagaaatataaagacgtcgtttataagggctatcaagcacggtacatggttggtggtgttcgtaaatctaaatacttcaaaaatcctcatgatgcccatcgccaatggcagctatggaaaattcaggaaatcgataatgtgatcaacgagttcagtactgatacccgacttgatcaacgagttatcacgcgtcttattgaagtcagaaacgatatcaaatgcgattacaataacaattttgaaacacaataaaagaagccccttcgctcggggcttatctaagactaactactactaaactatttatagggatgcaaaatgctaaaatatatatctgccgattgtggcagtgggaaaactcatgcactaatttcaatcgcaaaaaggtcaaatgatagatttattatcgtgcaaagtactttacagttgatcgaacaaactacaaaagaactaggtgctattgctacggcgattacgtcatcgaatcatagtaatgttatcaatgcaacgattgaatttttaatgaagcctactcaccgagtactagtactttctgagaaagcatttcttggaattagcgacctatctctattaagggactggaagatatttcttgatgatgtagtaaacttccatgcttataacgtcatcaacactgagaaaaagtacgaagttgagaatgaactttttcgtgactttgaagaagtatcagagcagtacttgacagctaaaccagtacttgaatttagcgatgatctactaaagcaaatgtctagctcattcgactttgttggaacttatgatcatttcgtaatgaatagtagtttcttcaacaaaattggtaaagctggtaatattgatgtgtattcaaatgattgcaaacaactaactaccttagcttgggtgaacatctccaagtacaaggatctagatgttactttcatggctaatctgttcgaagaaactctaatctacaaaggcaacaaagaactattcgagaaagttgatttagatggcttacgtgagcgtgtgaagacagtacgggaacgtgtgaaggtttactacttctcagagaatcaacgcctcacaaagtcgttcagggactctcatggcgataagttacaagcagtgtatgactatataaatgctaatgtaaaacagccttactactacactactaataacagtactggcaaagtgctaaatggtgtttatatcaagcctgtaagccgtggtatgaatagttttcaagattacagtacttgcgtatggcttgcatcaatgaagccgtcaccagtcgaagcaaagcagttagaattgatgtttaagatcactggtgaagagattacatatgctcgtgagttagaaaatctctatcagttctgtaatcgtagtagtctaagaaagtatgacagtactgaacaagtagtagtctacgtgttcgacaaggaacaggcacgctttctaagtgacgatatcgagtacatcgatgttggtattgatgaagtacagaagtttgtaccgctagatcttggaagtactaaaacgaaacgcctttatcgtactttgaaaaagaatctttcagaagattcttttctaacgtggttgcgtagtgatactaacaaagatttatcagatcgtgaacgtgagcatttcagaactcagtactacaagcgaatgtctaaatcaccaacatagggtgtccattttttacctataaggtttaaggtattttgtggacattcaatcatgaaatgagttgaacaagtggatttggagtgctctgagcacgacaaaacacgcagggaaacgaaataatgcggttgcttgcaactgcattgatcaagtaatgatattattaattacgcccattgctcacaagttcgcaatagtcggcttgtttttcttagttgcacttgctccgctgcgtttacttgcgaacaaaggcattacttttttaagtagttaatgggtattttaacggccttgttagtaactgacgcgggacaagcccttgtcgggaatcgggctgttaaagcccttaaataaaaatacccaaagtagccgccgggcagtactaacccgatctaattgaacagccctatgatggtgattttaactaactctgaaaaagttagtaaatttctgctttttaaaattttcatagcaatcatcaagtgtagctaaatctttcaaaaaatcttcatattgtgatttaaattgtgttaacgtaaactcaaaatcctgtctactcacgcaaataagattgtatatgcatgaacgagaataattataagcattggcagcagaagcatttaaatttctgagtgacttaatgactgcatttatcttttcagggttcaaaacagtaatagaccagcgttcaattaatacaagttcatcactcagtccatcaactaataaaatgttacctgaatgttgtttggatagtttctcatgtctatcttgcatttcttgatcagcaaaaataagattggaatcaagagcatttagatactcaagtgctgaatgaatttcgcttagatatcggtttctttcgcgataatgattatcaatagctgataatatattctctgctttatcgaaacctttagtatgtgaacgttgtgaaaaccattgtttagcatttaccgccgcataaacagctgcaccggccatcgtccaatctgctattgtacctgtaatatcataccaagccatataagctccttaatcaataaacaaatctgaatagtgtttaattattttgttgtgtgatgcacgaaggacactgtactgtttactcaattttatatcattttcaaaactattatttaatcttaaacaagtctcgttagatccaatagataaagcagcttcgatagcataggctaactttaaatgctccgatagtataatttcaaaatcatctgtgtttttcggttttaaaccccatagctccattctttccatttcatttcgcaaagatatggtatttttcctataggtagattctctatcatgcaagttactccagcgttttgcaaagctaacagtatcaccctgaatatctggatcggtgttgataatgttctttacttcagcgtatagataaaaggcttcctgttgtaatctacaaaaactatctataatttcatcagcgaacttgaatttacgctcatttaatttaggtgataaccagtctttagcattaaaggctgcataaacggcagccccagccatgagtatattggcacccgcactaatccaatctgttaatgaacctagttccattttcttatccgtgctgtagtagagagtacttatcaatagcagtactacaagagtgagtagtactatagttagtcctatgagtaatcgatttgtccatttcatctaacgtacttccacacactagccggaattttatcgtataacttacccatcgtgatttctgctagtcgatggtcagaagctgcatagaaagtctctaactcattattagaaagttcatacttgttcttatcaatgactttttctagtgtttcaatactaatacaccggcgaagttgcattatccaatcttgtttggtcatacaggctctgtgctgtgggaaggaagatacaagtactgattctacaccaaggctgcgttgttggcgatacagaccagcgagtgataacattcaaaatgtcccgatcattgggtcatataatagattaattactaaaatgatcgggacaaagtgagtgttttttaatcattaatgacttgtctactactttatgcacgggacaaaccatatgaaggaaaatggagaggtaaaactttcctctccaaataagttacttaccgttcattatagtgattaagttatgagtgatgctctagttcagtaattttgtctaggagggtcgtatattcatcaaagccggttatatcagtatcttttacgctttccgtcatgctttcaagtatattccttgagagctgatagattaaacgtaataagctttctgacgtgacacctgctgaactgttacctttagtataggtgatacttttgttgtcgagaaataaaatgtgtcccaatttacctgttttaatgaatttatcttcgcatatataaaactcttcattttctgattttattttattgtattcttcaagtagtaatcttttaagagtagaatcaccaagcataaaaacttgatcggattcaaatctaagataatggaagttttttacattgccactatttgttacaacacgcggtgcataactaaagttcatggcgttatgtttaatgtagttgttcagggtgaaaataatgtcgtagtcgccattaattaagaatttaatggatttatcaaatgcatcattgcaacgccgtgtatattcttctttaaattcttcttttgaacttaataaaattgaaagttgatagttttcaaataatacaagcttgccatgttcataacctttttcgcctatattttttctaaatccatcaaatctcggggctttcggttcaggaagaacagtcccgatgattgagtaaattacgcagggaagatagtattctgccagagatgccgcattgttaataatagcatcaaggtagtaatgacaatctttctctaaataatgattttctcgcggccgtgctaatagtgtattaaattcctcgcaaaaatatatcaacttattgaactgatacttcagagatgactcgtaaatagttttagcgggaattgttccagttcgaggttcatattgaggtaaaatcatgctcatccttattagtttaattgaaattaaacaactcaataatatctttatctagcttggatctaaagtgttcaatatttctatactgggcacttagttcttctctggccttattatagtttgctatttcctctctagataaaacactatataacgctaggcataggtcataaaattttaccatatcttcaagatggttatcaaagccaacctgctgacttatactaaatctagagcatgattgtaatctatcctgtagtgacattatgttatatatgttgttgttcattcttgttttgacactattgaatatttcatttgttctgactaaatcaagcattaaaaaataaagacgatgcgtttccaagaatgaaatgtcatagtctgccatcaatttagttacatgctcatatcctgctgagttatgtttgtctttaatccagtttttggcgttgattgcggcgtaaacggccgaaaaggccataagtatatttgcaatagcagccgcccagtttgcccataccccccaatcgtttaacttgatgtattgggctgcataaatatttgcgaatgcaaaggctagtaatgctaccaaaatgcatagaagtactttaacgatgttatcaactgtcattatatcctacctgattgtggaacttgtattgtccgtactattagcagttgataatatagtactattgatccgggttgttagatagtgggcgtcaccctcgtagtttatgtctggcaactcggatcaacccagcctcctgtaagccttaccacgcgatttaaatcacgataccaataacttgataggcttttgcacgcaacgcctattaagcccgtacacgcacgatttaacatttgatgtcggttgtaacgatcgaaagtgcggttatcgatcgttaatgttgatcaaagtgctcgtggcgagatataacaacaccaaggaatcggggagacgtgaacaacaactagaattaccccagcccgcctagtgcgggtttttttatgccctaaataccaaaaggagggcaatatgatcctatcaacaacacagacatttctaatacagaacgcattgtatcaactaattacattcggtgatattcgtgtagagacacatctgtatttcaataatacatgggaagtactaataagtggtgatgcatttaaagtacttaaattcaatcgaacactcacggcattggatgaacctgaactattccagtactcaacactaatagacgccaagatattagattacatcattacccaacaccacgcattggagaacctactatgctattacagtactgcacattaaatacaatgactactacctaacaataaacagtactaaactcacagccagatataaatacataacaatacacgatgggtactatgcaacgattggaagcaggatcgaatatgactatctaaattacacaggcaccgaacgcaaacacattcaagtactgcaatcgatgatagacacagtgacagtactgttcaaggaagcatagtctagtactgacataattaagtactgaacttcatcgatcgtcgtcgaaaagtattgattttaaaataaaaaaggtactaccaatgagaaccattctcaagtgtagtttcgccccgccttgttttaaaaatatatcgacttttaacccttattccgtaccgcaaggaaaataaatgctctctttacaccaactagctagagaatatggctatgacgaatcatcattacgtcagtggaaacaaaaaggaatgccacacggcaaagatattcctgatacagaaacacgaaattggattattgaaaatgtcattaagccattacgtgaaaatacaagtactaaagaacaaattgaaaaagaacgtctgcgaaaattaaccgcaacagccaacataaaagaacttgatgaagccgagtgaagaggggaattgattaacgctgcaattgttgaatcagaacttgcaaagtactttcaccagttcaaaacagtcatgcgtagtattccatcaagcgaatatttaaaactatttgaaagcaaggatgctatcacaatgaagaataatttaaaggacgtaatagataatgcactcagagaaattggatctcttgaaattcaagaagatctaccagaaaacgataaaaaaaatactacctccagaaagaataaaaccaagtaaatttgcagaagataatctagtatttccagatggccgcctagcaggacaaaaactcagattatttgaattccagcgtcaagtactagatacaatcgttgagcctaatattcatcgcatcgtcatgatgtcatcggcccagctgctgaaatctacagtaatgcttgcagccatgaattacttcattgtgaacgaccctgctaatatggcttatggttcacaaagtacggccagtactcagaaattcaaaacaggtaaatggcaacctagtattgatcagtcagtactgaaagattatgtgacactcaaatcagataagaatgccgctaacaatgctaatacacaacagaatatcgacggtactaatacctatatcatcaacttgaatgccccttccactttacgcggaataactactaaaagaatatttttgggatagggatgataattaaactaattaaatctggtattggattatttcagaaaaaagaacagagtaaaaatgagttagaagctcagaatagccacgaacagaatcagatcactcttgaggaaactcgtaagggcttcacgtggcggcaggcacttgggtatgtattgactttcatcgttgcatggaattacgtgattcttccagtactgttggtatgtggtgtagtactcccgccaatacctcttgatgatgtatggcgggtactggtaatattaattggtggcagttaattattatcgatgaacatattatctacatgggatagcacattacgtaaccaaaagggtcttcgcccaaatgagtgaaggaccaggggagtaccatccgaaatcatttttctatagtcatcgtctgttaatagttcagtattgataataatcatgatatggttatcttcttcaaaattagatggataacttagaccaagagaactcattagctcgtctggtgatatatttctattctttatacgctgaactaaccccggatgatggctaataatataagtgactattgcaatagcgacttgctccgtttcggatttcctctccgcctgagaggccgaaattaagctcatgaagccaaatgctctttctgcatctcttagactagcttcatttctagataaaagatgcgaaagcatatggcatgcaacttgaaatgaaccattattaccaaatctagtattagatagatgttcgcagtacttccctacagcagctttattagttagagaaactggttctttaggtaaggtgaaccagtgatgtataaatttacttaaatacagtttggcatcgatctcgccataccttctcactataactttttgaaattgctctctattcattgatagtataaaaacaaagttattagttgagaaaacatgttttattttttctaatatttcaagtgagaaatcaggcctcgctctatctaattcatctattataaagactacttttttattttcggctactttttgtaatgtttccttaaagtgggctagggttagttcgtctttttcagcattttttatcttgtcctcaatgaatttatctatagggtcagataatccatctgaaatactatcccctgcactctcaatggctgtaccatttactaggcctgccgtggcaatacttatgcctactttagctgatattcctagaaggctttttccaacggcctttgctccatcaataaagcgtttttgtagttcaggctcttttttttcgattaggctatatatttttgacgcaatagctaagaatgcatcttgttgataatcattctcgaaagcatcaaaataaattgcttttaaagtacttggttcttttttgttaaggctactttcccataaacggagaaacgtagtttttccgctaccccagccatcatcaattgcaaatactaaactttcatcttgtgagttaataatgatattttctaactgtgtagcaaaacgttgcctgttaaatatatcattttcatgtgtaaaaccgtggctataatctaattcacgagtggttagtcgcatttataatcctcccaataggtaaatggccacatgattatggtgatgttctggtaatatttttattcacactcccatatggtgttctgtacgccactacctgcgggtaggtgggggttcacgtttgcactgtgagtgtatgtagcttttgtcttgccgtactgttggcaagctgcattcgctgtcttctgtaggctatcgaggccgtaccatccatctgactgaatgctgactgttttaccatcgttgtactgcacttgagcacaaccagtgagaagtaaaaccagaagcaactttttcattcgtgatttcaccaatcccattttactgttgtgtttaagcctcgtaggttggtgtgctctgttcttgttgctttcagtactatctgtccagtttcacgatcgatgatatcaaaagactcgatttcggtctgacccatagtacctttggttctcatgttagttctcacataatcgaacctatctcgcggatagttttcttcgaattgctcttctgtcatttcatcattcccagtagagttagtagccatagttatcttagggtaatgaaactaatgttacaacatgattgctaattgtacatcttattgcaaaatgtgtaatctggggagggtatcccatcaagaggacttacacatggcaaaaggtaaagatcaacacgtgacgccccatgctgatggatggcaagttaaaggggagggtaacagccgtgcaacggttgttactaacactaagaaagaagcaattgatgctgcccgagtaattgcacgtaatcaagaaagtgagttagtgatccataatcgggatggaaagatttctaactctgattcacatggacacgacccatatccacctaaagatactaagtgactgaaaaggagccgatttggctccttttcattgagttcgcactcgggatgagattttcaaggtgatcgcgttactgctttctggtttctaacaaccggcggtatgtgctttttactgtcttttattgactaacatcttcctgctgatgatgaccgtggtgtttatgctgttcgaagtgcagctgctgccttacaagctgcagcaggcgctggataagccgaacgaggggctcgccgcgatgcggcgggcgctggacggcgtgacgcgctatctggtgatcaaaaccatcatcagcctggccaccggggtgatcgtctggatcttcctggcggcggtcggcgtgcgttttgcctttatctggggctgctggcgtttctgctcaactatattcccaatatcggctcggtgttggccgccattccgccgctgattcaggcgctgctgttcaacggattgggggatgcgctggtggtggcgggcggctttatcgctgtcaacatggtgatcggcaatatcctcgaaccgcgggtgatggggcgcgggctgggggtgtcgacgctggtggtgttcctgtcgctgatcttctggggctggctgctcggcccggtgggcatgttgctgtcggtgccgctgacgatcgtggcgcgcatcgcgctggagaccaccgagggcggctatcggctggcggttatcctggggggcggccgcccgccgcgccagcctccggcggcgccggagtgaggcgagttttattgccacgttggggcgcgtgttgttaaggcgttttgaataggccacccaatggtggcttgacgcttctactgttagtgcatactgagaacattggctattcagcaaaaaaactacaaccacttaaaccactttacataggcgacacaaacgacaatggcccagatgagggtgagataaaaaccaaagtttgggaacactgaaacaaaaatgaccccgccgaccataatgagtacgatagggattaggtaagcgaatgagttacccagccattcaatcaaccacttcattttgtgagcacccaaagttcagaaagattttctattttactcctaaagactatatgggtaacaacaggaatatcacttcggcaagttagtggcatccaagggttcgtaaaatttatctttatccatataattttcaatatatataatgcggtagtgattaatgacaggaattacggatgatatagctagtgaaatacttttaagagaacagtgataactgttgtacataccaagaaaagcggtagagtacataaatgtaccaagcataaggatatgtgcatgttgataatgaggatgagttacaacgatctttcaaaaaacggaggagaagcgaagctccacgtctatgggctaggtactttccccgtttttctggtaggcagccgtacacaaatgatcccaactgtacctacattgagaacagtgcaatacctgttggtcgttattgggtggttgacagaccgagaggtagtctagccaatcaagtccgttcgtgggtacttgaccagtacacaggaaacgatcatagcgactggttagctctgttcagtgctcaaacaatgagtgacagcatgtttgtaaataagatcgcacgtggtagttttagattgcatccgctcagacccgatggccgcggttatagtgaagggtgcattacgtttgtgagtcgtctggagttttacaaggtccgtcgcttcatccttggaatgaagcttattagagttcctggggcacgcagtacgttgatgacctatggttttgttgatgtgcaaggggagagcaagtttgaaaaatgcatcgctcgttaagaatataatactgtatattgcatgtttcattactgctttctgtttctctcgccatgggatgccactgtatggcttaacgtcactcatcatcgatacctctcaacaactctttggcaggtatcaaacaggtttctatgaaatggacgcagatccactaacattcagcacactgatattcactgtggctctctatgccttggttatattcggtttggtaaagatggcattaagacaattcagataaatacagaatgtccgatgtgttaataaaagggcatcttaccactaataagttagtattaccggaaaagtcgtcttttcctccattagattttatttattggaagccccattgaataatggttcatccatcgcaatcgtctccgatgctgccggagtgaggaagatttttccgctcacgccgggttgtgcggcatgctgcagcgccgctgcgtactgatgcaaaggataaatcgcggcgggtgggcgcagcgccagctggccgcgccgcagcagctggaacaactgataaaacgccatctgccattgcgccggcgccgcctgtgcgttccatttgcgcaggtggaacagcgaagcgcgcagctttaactcgtccaccacgcgccgccagtctacctggcggccgctcagcaggcccagcgccacaaaatcgccgccggagcgcaccgcccgcgccaattgcaatccgtcttctccaccgatgcagtcgatggccgcacgggcgccaaaattcgtcatttccaccagctgcggcgcttcgataacgcgccaggcgccggcggccagtaaagcctggcgatgagcggcgttgcgcaccacgaccgccagacgaatgccgcgcagcgccgtcagctgcgccagcagcaggctgacagcggagccgccgccgttgagcagcagtacgtcgccggcgttgagcggcagccattgcgtcaacagcacccagcaggtgagcgggttgatatagatttgcgctgcgccagcgtcgtcgatgtcgtccggcacccagatcacccgatcctcaggcagcgtgacgaaggtttgccaactgccgttacccgctaccgccagcgcgcgtcggccagttgaatgcccattctgcggattgacgatgatgcctacgccttcatatcccggcacctgcggcagggcgatgcggtgcgcgtattggccgtggatcgggatcagatcggaagggttgatcggggcatagcgcatctgcaataaccgctgcccggggcgcagcagcggtctgctcatctgctgcaattccagcacctgggtgggatcgccgaagcggctgaagctcaatcggggaaataacggcggcatggcttacatgacgaagaagaaatagacatccaacgccagcagcaccagccacagacaaaggtaaagcaccaggtgctcacgcacattgttgacgatagccgccagtattcggtttaacatttcagccgcctgaagagaaggacccttgattatagtccttttctcggcgtcttttacagcgcgccgcgcgtgagtgctggaagagcggcgataaaaaagcctgcgttatcgcaggcttgatgttataccgccagcagcgccagcggcgtcgaattggttggcgtgctcggtgggtagaaatagcgcagcacgttatacagcgagtagaactccagccggttgcgcgcgttgatcttctccgtgatgtgacgcttgtgcacgtacaccgtatgcgagctgatctgcagctttttcgcgatacggtagttgggcatttccgccatccaatatttcattaccgtcagttcttgcgggctgaacagggaacgctcttcgccgtcatcggccagcgccagcggattttcgcgcagcgtgcgtaaggtgagcggcagaatgcttttattgaacagaaaggcattatcggcaatgcgcattggcgcttcgctgtaaggataaggtgtatcgagatagataaacagcaaggcggactggctggcttccataaatgcctgcagctgtgcgtccgcttcgttatagcggcattggttgctgaggttcaccagaatgtggctcggctgaaagctggccaacagcggcgtagcgtattcaatgctgtggcagcacttgatcgtcgtaatcccactatcagcaaagtagctggctataccgacccgggtgaagcagcattcgtccacgacaagtagtttcatggtgacgtccttgttgaaagccgatggagcatatcttctgtaaaataggacttacactgcaagtgttcaattcggaaattcaaatgctgaatgcaagaaatttccgttatcagaatttttacttggtatttaaaagagttagcaggttaataaattgtaaccggcagatttcgctgtccagagcgcgacgggaacgtggacagcgaaatccttcgcttagctgaatcgcttcagaccaaagctggagaggtcaaccggcggcgctttgtcctgcgcgaacagcgcggcgatctcgcccagtgcgctggcgaacttgaagccgtggccgctcaatccgctgatgaccatcaggcgatcgcaatccggcagggtatcgataataaaatcttcgtcggggctcatatcataactgcaggcttcgccgtgtaaacatacgcctacacccggcaaaaattgccgcaggaaggagaaaacttccgtgccgtcgctggcgtagctgccgaagggtttgcgctgttcgggggcatccatcggctggccgccgtcgtgtttgcccactttcaggccatcgttatccgccgggaagccgtaatagtgcgtgccgtcctgcgcttcgacggtaaaggccgggaagcgattgttcacgctgtagcggccgtccgcctgatgccaggagaataccttgcgcaatggcgcgataggcagctgcggcaacagcgctttcacccaggtgcctgcggtgaccaccgcttttcgcgccgtgaaacgcccttcgccggtgacgatctcaacgccgccatcaatggggttcaccgcgctgaccgggcagttgaacagctggctgcagccggcctctttcgccagtttgatcaggctggcaaccgcctgttcggagcgcaggaagccggcgtctggctcgaagacgccgacgtaaccttccggcgcgcggaattccggccagcgttgagcgatctgttcggcgctgagggtttgcgcattcaggcgaaacttttgcccgctctgctgagcattgcgaatgaattcggagtgctgcggccccaggttgagtacgccgcacgactggaacagttcttcaccggattgctgaatcagcgcattccacagcgcctgcgcacgcagcaccagcggcacgtacttttcaccttcgccgtaagcgtgacgaatgatgcgggtatcgccgtgatggctgccgttgcggtgtggaggaatggcgctgtcgatcatcagcgctttcaagccggcccgggtagcgtaataccctgccgccgcgccgactgaaccgctgcccaccacgatcaaatcatattccacgtgcccaccctctctgatagcaattgcttatcgccccatgataaaaggttggcgagcgcaatgcactgattgaacggtgaaaggcaaagaaaaaggcgccgggaacggtcacggcgccttagggttaggggacgatgaatcaatgttttctgcgatcaagatcctggtaatccgtagcttcaatcttggcgatgccggcctctaaaatattgattaattgacgggcgacatctgtagtcagccaaagcgttcggtctacttgggcttcttcgggcgtttggtctagtgaagacaggtaatgaaggcgtatcatcatggcgtcgtaaacgtcgacagtactgatatcccaaccgacaagcgggtgcgtctgaattacttcatcatttctgtccataaagaccccttattgagtagtaactaccgtgagtgactaacgaggatcaatgcggctcatcatcatgagagcaattacagtatacgcatccgctttcaacggtggagagggttgtcaccgaaatttgcaaaataaatatttatttgaacaattattctacaaatttgtatgtgcagcagtggatgagcagagcgcagcgcgttattccgcgtcggcaggcggcgatgcgccatgcagacatttttccagctcttcggccaaatgggcgaaatgcttttgcgtttcggcatcgcgattctggctgtgcgattccagcttcaggctgtggatcagccgttggttggctttgtcatccaggctgaaggccagataagaaaaagccacttccagtacgttcaagcgccttttctgatcggctatcagcgccagcagttcgccaaacgtcattgcgtcttcggatttcaccttgtccggggccatgcttactcctttgcgttaaatacagcgctgaggcggattttgttccagagtaagggtaagcgatgaatgggcagggcgccagaaacaaaaaagccggagagcgacccccggcaaaaacagcattgcagtgttattctgcgctaaaccattcgtctgcgctttcccaggtttcctgaaggatttcctcgatcagatcccggtcggttttggcgccccccagcacggagagcccgttggcgccggcataacgtacgtgcacgacggcgtctggaaactggcggttgacccgcttgcccagttcaccggtcagcgcctcaatggcgcccgccggcagcggccgggttttatctatagtgacttcaacacgcataattgcccccgaagcgatttactgtttatttatacagttaaccgagtgcgggggcaagagggcgaagcaaaaatatcagtctttcagcgaccagttcagggtttcacccgccaagaaggggatcacggattcattgccgagggcgatctcttccggctgggtggttggcacgcgctgcagttcgatgaagtcttcgttgagcggcaggccatagaagcgcgggccgttgagcgaacagaaggcttcaaagtgttccaacgcgccgagttgttcgaacacggcggcgtaagccgggatggcattcggcgcgttgaagcagccggcgcagccacagctggactctttacggtgcttgaggtgcggcgcggagtcggtgccaaggaagaagcggtccgagccgctggccaccgcctgacgcagcgcctcctggtggacattgcgcttgaggatcggcaagcagaacaggtgagggcgaatgccaccgaccagcatgtggttgcggttgaacatcaggtgctgcggcgtgatggtggcgccgaggaaacgattgcctgcctgcacatattgcgccgcttccttggtggtgatgtgctcgaagacgatcttcagctcagggaaatgctggcgaatcggttccatcacctgttcgataaagcgcgcctcgcggtcgaagatatcgacggcgggatcggtcacttcgccgtggatcagcaaaggcatgccgattttttgcatctgttcgaacagcgggtaaataccagtcacgtcgctgacgccgtggctggagttggtggtggcgttggccggatacagcttggcggcagtaaacaccccttgctcgaagccgttgaccagttcactggccgccagggagttggtcaggtagcaggtcatcagcggagtgaagttgtgcccctgcgggaccgccgccagaatgcgatcgcggtaggcgtgcgcggcggccacggtcgttacgggcggaaccaggttcggcatcacgatcgcccggccaaatacctgactggtatagggcaccaccgttttcagcatttcatcgtcacgcaggtggatatgccagtcgtctgggcggcggattttcagaacttgaggttgtgcggtcatctagctaggctccggcggtcaaatacgtctaatgaaaagcgaataatgggtttattcacgccggggtgtaaggataagcggaaagtgccgcagatgcatctgtttgttggcgacaagttgaaatcaatagcgcggcgggcgcatagtaaccgggatttcaacgatgccgacgccaataccgtcgaccttcatcaagtggaaagggagaaagcaatggaagtacgcgttatcgccaccctgcaagcgaaagcgggatttgaagccgccgtcagcgaagcggtgcacgacattatcgagccgagccgccaggagttgggcaacctgcaatatgacttgcatcgcgatctggaaaagccgggtgttttcgtgttctttgagcgttgggccagcagcgaagcgctggataagcataatgagacggcgcattttcagcagttcgtcagccggcttgacggcaagttggatgttctggacatcaaaaaactgaagaagatcgcctgagtattttacaggcaagaaaaaacccgccgatggcgggtttttttaggggtgcagattaacttattcgttaaccggctgcggtttggtggccggcgcggttgcctggctcaccgccgaatggccgcctgcggagcctttgccttcgaagttgaaggaagggcgctgccagtcgctgtgcttgcgttcttccggtacataggctggtgccggcgctttggtcatcggtgcagtggcgatgtgtttgtacagcacgttctgcacggctttcaccggcgccggctgctgagcaaccactggcgcaggggctgtttccaccggagcggcttccacggccgccgccgtaggtgcagcttctaccactggcgtttctttcgctggcgtggcttctaccggcgcagtttcgaccacaggctcgtcctcgaccgacttagcttcaactacaggctctgcagcaacggtttcaactaccggctcggcttccactgccggggcagtctcttccactttcggctcttcaaccgcggcttccgccggcgccggggtttcctcggccgggatagcaacgacaggcgctacggctgcagcttcttccgttacggtgacggcggcagtttcaacggcggcttctggtgccggttcgttgacgctggccgcggcctgggtttcttccacggcaacgttgtgttgttcaaccgctgcggcgacaaccggtgcctgctctacggcttcggtctgcacttcggcttcttcaacctgagcgaccgggtagcttacccagactttgcccgatgccatttccggcgaagcgaaggcacccgccagcggcattggagattgcagcgggtaacgctcatcgcggtaacgacggcggcgctggccgctgacgcgcaggtgacgcggtgaacgacgggagcggcgcggcatgccttcgccgttgccgcggttttcaccctgggcatcgtcttccggctgtgcggcaacggtttccggcagcagcttgacgctatcgtcggcggtcggctgcacgtcttcggctttcgctaccggcgctttcggcgccaacagctcttccgctgcacgctgcagctcttcttcggcagacaggatacgcactttctgcgtcagcgtgcggcgctgacggcgctgcatgttctgctgctggcgttcttcctgctcttcgtcggtgctctcgaccgcttcaacgctttccagcgctttcacttcctgctgagcctgacgtttctcttcctgacggcgacgctggcgttcagcacgctgctcacgacgctgctgctgatcttcgcgcggcgctttagcgctttcttccgaagtggtttcctccgctaccggcgcgttctgctgctggttgcggcggttacgacgctgctcatcgcgggactcacgcgattcacggccttcacggttctcacgcggttcacggttgtcgcgctcgcgattgtcacggccttcaccgcgctctttacgctcgccgcgttcaggacgatcgccacgctcaccgcgctctttacggccggtgccttggcggcgctgaccgcgacgatcctgacgacggttttcaccgttgccttccgctttcggcgtttcggccggtttggcttcttcgacggcaggttgttcttcaccggcgaacaggctcttcagaccaccgaacaggcggcccaggaagccctgcttggcggcggccggcgctgcggctttcgccttggcggcggcagcgacaggtttggtcacggcgacgggctcttcagccggcggcggcgcatcggcggacagcgagaaggaagccagggccggttgctccggacgcttgcgttccatcggcgcatcttccagcgggcgctccatgtcttcttcgtgcagcttcggcagcaggtagctgagggtagaggtttcctcgcccttgcgcacgcgcagcaccgagtagtgcggggtttgcatctgatcgttcggcacgatgacggctttcacgccgccctggcgtttttcgatcgcgctgacggattcgcgcttttcgttcagcaggtacgaagcgacctgaaccggcacgatagcgtgaacttctttggtgttttccttcagcgcttcttcttcgatcaggcgcagaatggacagcgccagcgattcgttgtcgcgaatggtgccggtgccgttacagcgtgggcacacgtggtggctggactcgcccagcgacgggctgaggcgctgacgcgacatttccagcaggccgaagcgggagatgcggccgatttggatgcgcgcgcggtcttggcgcacggcgtcacgcaggcggttttccacttcgcgctggtggcgtaccggcgtcatgtcgatgaagtcgatgacgatcaggccgccgaggtcgcgcaggcgcagctggcgagcgatctcgtccgccgcttccaggttggtgttgaacgccgtctcttcgatgtcgccgccgcgggttgcgcgcgcggagttgatgtcgatggcggtcagcgcttcggtgctgtcgatgacgatcgagccgccggacggcaggcgcacttcgcgctggaaggcggattcgatctgcgattcgatctggtagtggctgaacaggggaatttcaccgctgtacagtttgattttgctgctgaaatccgggcgacccagcgcagcgatgtgctctttggccagatcgagaattttcgggttgtcgatcaggatttcgccgatgtccgggcgcaggtagtcgcggaaggcgcgcacgataacgttgctttcctggtggatcaggaacggcgcagggcggccttcggcggcttttttaatcgcttcccagtgcttcagacggaaggaaagatcccactgcagcgcgtcggcggatttgcctacgcccgcggtgcgaacgatcaggcccatgccgtccggcagctgcagcgaggagagcgcttctttcagctcggtgcgatcgtcaccctcgatgcggcgagaaataccgccggcgcgcgggttgttcggcatcaacaccagatagctgcccgccaggctgatgaaggtggtcaaggcggcgcctttgttgccacgttcttctttgtctacctgaacaatgacttcctggccttcgcgcagcacatctttgatgtttgggcgaccatgggaagagtaattgctaggaaagtattcgcgggcgatttctttaagggggaggaaaccatgtcgttctgcgccgtaatccacgaacgctgcttcaagacttggttcaatgcgggtgattttgcctttgtaaatattcgcttttttctgctcatgacccggactttcgatatccaaatcatacagccgctgtccatctacgagggcaacacgcaactcttcctgctgagttgcgttaatcaacattcttttcatcttaacttactcgttatttttacattatcgacaaagctgcgggcaaaataacctcatggccggagttaaaccgaaagccccgtgtcttctcgcaaagtcgtcaacctcacggttgtcgcctgcataggggcgcattatctcggtaagcctgcttttctttgtgaaagacagcacttttactaggggaatagcctctgatttacgtcgacagatctgattccatttgccggccaagctgcaacccgcagcccgctaattgtttgatttcgcattacgtcttacgccattgctgcgtttttgcgcgatcagacaaattttataattccaccgttttccctgtttaacgagaatcaacgcggaaagtgactgcattattccactgctgatgccgttatagcaaggtgacttttccttaactgcggaagaaatcgcaaacgttcaaatcggcttgctgccttattgtccgctggggtttcgcccgccgtcagagagacagttaagcacagaaaaagatgtggcgctattcacgcgctctatttagaatcccgcaccatgaaaacgaacaatccagcagtacaattcatcacgatttccgacgacgaagccggtcagagaatcgacaactttctgctcgctcgcctgaaaggcgtaccgaagagcatgatttatcgcatcgtgcgcaaaggcgaggtgcgggtcaataaagggcgcatcaaggttgaatacaaattggcggccggcgacgtggtgcgcgtgccgccggtgcgggtggccgagcgcgaagagacgccggtgtcggccaagctggataaggtggcggcgctggccgactgtattctgtatgaagacgaccacctgttgatcctcaacaagccttccggcaccgcggtgcacggcggcagcggcctgagcttcggcgtgatcgaagggctgcgtgcgctgcgcccggaagcccgcttcctcgagctggtgcatcggctcgatcgcgatacctccggcgtgctgttggtggccaagaagcgttccgctctgcgttcgctgcatgagcaactgcggctgaagggcatgcagaaggattatctggcgctggtgcgcggccagtggcaatcgcactgcaaggccgtacaggcgccgctgctgaaaaatattctgcaaagcggcgaacgtatcgtgcgcgtcaacagcgaaggcaagccttcggaaacccgcttcaaggtagaagagcgttacgaattcgccaccctggtgaaggccagcccgatcaccgggcgtactcaccagatccgcgtgcacactctgcatgccgggcacccgatcgcctttgacgatcgctatggcgaccgcgagttcgatcgtcaactggcgggcaccggcctgaagcggctgttcctgcacgctgcggcgctgcgctttgagcatccggccaccggcgaaacgatgcgcatcgaagcgccgatggacgaagaactgcgccactgcctgcaggtgctgcgccggcaggcggccaagtaatctgcgtcacaccagcgggttgatgccttcagcccgcaacatgtccaacagcgcgatcaacggcaggccgatcagggcgttcggatcccggccttccagcctgtcgaacagcgcgatccccaatccctcgctcttgaaactgcctgcgcagttcagcggttgctccagacgcacataggcggctatctccgcttcgcttagcgcgcgaaaatgcacgtgaaacggctcgcacaaggcttgcagctgcttgctgcggccgttgtacagcgccaggccggtatagaaagtcacggcctggccgctggcctgccgcagctgcgcgcgggcgttttcctcggtatggggcttgccggtaatgttgccatcgatcacgcagacctgatcggagccgatgatcagatgctcgggataggcgagggccaacgcctgagccttcgccgccgccaggcgcagcaccagcgcttcggcactttcgccgggcaagggggtttcatccacctccggcgcggcgcagtcgaacggcagctgcagcttctctagcagcatttttcgatagggggaagtggaggctaaaagcaatctctgcataatttttttcgcaaaccgtagcgtaaatgggtacggcattttaaactgtcggccgctgtggaagcgaatattggtgaaaggagccgttttacggcctttttctttgactctatgtcgttacaaagttaatatgcgcgccctatgcaaaaggtaaaattacccttgaccattgatgcggtacgtaccgctcagaaacgcctggactatgctggtgtctatgcgcctgagcaggttactcgtgttgccgactccgtggtcagtgtggacagtgatgtcgaggtgtcgttgtcgttcaatatcgacaatcaacgcctcgcggtgataacagggcatgcggacgtcacggtaacgttgatgtgccaacgctgtggagtcccgttcgaacatcaggttcacacaacatattgttttagcccggtcgtcaatgatgagcaggctgaggcattaccggaagcgtacgaaccgatcgaagttgacgagtttggcgaagtcgatctgttggcaatgattgaagacgaaattattctttcactgcctgtcgttccggtacatgaatctgaacactgtgaagtgtccgaagcggacatggtattcggccaactgcctcccgaggcggagaaaccgaatccgtttgccgtattagccagtttaaagcgtaagtaattgaggagtaaggtccatggccgtacaacagaataaaccaacccgttccaagcgtggcatgcgtcgttctcacgatgctctgaccacgactactctgtctgtagacaaagtatccggtgaaactcaccgtcgtcaccacatcactgccgacggtttctaccgcggtcgcaaggttatcggctaagtagcgataccttgactcgtctaaccctggcgttagatgcaatgggcggggacttcggtccctgcgtcacagtgcctgcttcgttgcaggcactggcctctaatttacagcttcatctcctgctggtcggcaatcccgacgtcatctctcccttgcttgcccacgccgatccggttcttctggagcgtctgcaagtcgtgcccgccgagtccgtgatcgccggcgacgccaaaccttcacaagcgatacgcgccagtcgcggcacgtcgatgcgcattgcgctcgaacagctcagcagcggcaacgcgcaggggtgcgtcagcgccggcaataccggtgcgctgatgggattggcgaagctgctggtcaagccgctggaaggcatcgagcgcccggcgctgatgacggcgatcccgaaccagcaacgcagcaaaaccgtggtgctggatctgggcgccaacgttgagtgcgacagcaccatgctggtgcagtttgccgtgatgggtgcggtgatggcggaagaggtgatcggcattgcgcaaccgcgggtggcgctgctgaatattggcgaagaagagaccaaaggcctggataatatccgcgaagcggccgctgtgctaaaaaatactccggcaatcaactatattggttacctggaaggaaacgaactgctcaccggcaagaccgacgtgttggtttgtgatggcttcgtgggcaacgtcaccctgaaaaccatggaaggggtggtcagggtgttcttatcgctgctgaaatcgtccggcgacggaaacaagcgagcgtggtggctgaaattgttgggccgttggttgcaaaaacgggtggttaagcggttcggccacctgaaccccgaccagtataatggcgcatgtctgttaggattgcgcagcaccgtagtcaagagccacggcgctgcgaaccctcacgcgtttgcagtcgcaatcgaacaggctgtgcaggcggtgcagcggcaagtcccggaaaggattgctgcgcgccttgaggctgtattacctaagagtgactgatcgtacatgtatacaaagattctcggtacggggagttatttgcccgtacaagtgcgcaccaatgctgatttggaaaaaatggtggatacctctgacgagtggatcgtcacgcgtaccggtatccgcgaacgtcgcatcgccgccgcggatgaaaccgttgcgacgatgagcttccaggccgctgaaaaagcgctggaaatggcaggtgtggctaaagaagacatcgggctgatcgtggtggcgaccaccacgaatacgcacgcgttcccgagcgcggcgtgcctggtgcaagacatgctgggtatcaaagactgcgcggcgttcgatctggctgcggcctgcgccggctttacttacgcgctcagcgtggccgatcagtacgtgaaaaacggcgcggtcaaacatgcgttggtgatcggcgcagatctgttgtcacgcacgctggatcctgaagatcgcggcaccatcatcctgtttggtgatggcgcaggggcggtggtgctgggggcgtctgaagagccgggcattctgtctacccatctgcatgccgacggcagctacggcaacctgctgacgctgccatataaggatcgccagaatcaagacaagccggcctatgtcaccatggcgggcaacgaagtcttcaaggttgcggtcaccgagctggcgcgcatcgtcgacgagacgctgcaggccaacaacatggaccgcagcgagctggattggctggtgccgcaccaggccaacctgcgcatcatcagcgcaacggcgaaaaaactgggcatggggatggacaaagtggtggtgacgctcgatcgtcacggcaacacctctgccgcctcggtgccttccgcactggacgaagccgtgcgcgacgggcgaattcagcgtggccaactggtgctgttggaagccttcggcggcggctttacctggggctcggcgctggttcgtttctgatttggacaggaagaaaaaatgacgcaatttgcttttgttttcccgggccaggggtcgcagaccgttggcatgctggccgagttggccgcccagttcccgatcgtcgaagaaacctttggcgaggcttcttccgccctgggttacgacctgtggcagctggtgcagcaaggtccggcggaagaactgaacaaaacctggcagacccaaccggctctgttggccgcttcggtggcgattttccgcgtgtggcagcagcagggcggtaaagcgcctgcgctgatggcgggccacagcctgggcgagtactcggcgctggtctgcgccggcgtgctggacttcaaggcggcgatccgtctggtcgagctgcgcggcaagctgatgcaggaagcggtgccggaaggcaccggcgcgatgtacgccatcatcggtctggacaacgacgcgatcgccaaggcgtgcgaagagtccgcgcaggggcaggtggtttctccggtcaacttcaactcgccgggccaggtggttatcgccggcaataaagaagcggttgaacgtgcaggcgccgcctgcaaagccgccggcgccaaacgtgcgctgccgctgccggtgagcgtgccttcgcactgcgcgctgatgaaaccggccgccgacaagctggccgtggcgctgcaggacatcaccttcaacgcgccgcaggtgccggtggtgaacaacgtcgacgtacgcaccgaaaacgatcctgaagcgatccgcagcgcgctggtgcgtcagctttacagcccggtgcgttggaccgagagcgtagaatttatcgcagcacagggagtgacgtcgctgctggaagtggggccgggcaaagtgctgaccggtctgactaaacgtattgttgacaccctgacggctgcggcggtgaacgacaccgccagcctgtcggcggcgcttgaacaataaagaggaaaatgatgagcttcgaaggtaaaatcgttctggtcaccggcgcgagccgcggtattggccgagccattgcagaaacgtttgtagcacgcggcgccaaagtgatcggcaccgcgaccagtgagagtggcgctgaagcgatcagcggctacctgggcgcaaacggcaaagggtttatgttgaacgttgttgatgcgcaatctatcgacagcgtgctggcatcgattcgtgccgaatttggcgaaatcgacattttagtgaataatgccggcatcacgcgtgataacctgctgatgcgtatgaaggatgatgagtgggaggatatcctcgacaccaacctgacttccgtattccgcctgtcaaaagcggtaatgcgcgctatgatgaaaaagcggtttggccgtatcatcaccatcggttccgttgtcggtaccatggggaacgcagggcaggcgaactacgcggcggctaaagccggtctgattggttttagcaaatctttggcacgtgaagttgcttctcgtggcattacggtcaacgtcgtggcacctggctttattgagacggacatgacacgggcgttgacagatgatcaacgcgcaggcattttgtcatcagttccagccaaccggctgggcgatgctaaagaaatcgccagcgctgttgcatttttggcctctgatgaggccggctatatcaccggtgaaacgttacatgtcaatggcggcatgtacatgatttaaaaaatgcgaaaaccatttgcgttatttgaggcaaaaaccgcaaaatagcgtaaaatcgtggtttgaccagccgggatttagttgcatctttttcagcattttatacactacgaaaaccatcgcgaaagcgagttttgataggaaatttaagagtatgagcactatcgaagaacgcgttaagaaaatcattgttgagcaactgggtgttaaacaggaagaagttttgaacaacgcttctttcgttgaagatctgggcgctgattctcttgacaccgttgagctggtaatggcactggaagaagaattcgacaccgagattccagacgaagaagctgagaagatcactactgttcaggcagctattgatttcatcaacgctagccagcagtaagagaacatatctaggcggtcgttcgaccgcctaagttttttctatccctagtgtcatatttttccctccctggaggacaaacgtgtctaagcgtcgagtagttgtgaccggactgggcatgttgtctcctgtcggcaatacggtagagtccacgtggaacgctcttcttgccggtcagagtggcatcagcctgatcgaccatttcgataccactgcctatgcgaccaagtttgctggcctggtaaagaattttaattctgaggatttcatctctcgcaaagatgcgcgcaagatggacgcctttatccagtacggtatcgctgccggcatgcaagccatgcaggatgcaggtctggacatcaccgaggctaacgccacccgcattggagccgcgatcggttccggcatcggcggcctgggtttgattgaagaaaaccacagttcactggttaacggtggcccacggaaaatcagtccgttcttcgtgccatccaccatcgtgaatatgattgcaggccacctgacaatcatgtacggcatgcgtggtccaagcatctctatcgccaccgcctgtacttcaggtgtgcacaatatcggccatgcggcgcgtatcattgcctacaatgatgcggacgtgatgctggccggtggggcagagaaagccagcaccccattgggcgtcggcggctttggcgcagcgcgcgccctgtccacccgtaatgacaatccgcaggcggcgagccgtccgtgggataaagaccgcgacggcttcgtgctgggcgacggcgccggcatgatggtgttggaagagtacgaacacgcgaaaaaacgcggcgcgaaaatctacgccgaagtggtgggctttgggatgagcagcgatgcttatcacatgacgtcaccgccggaaaacggcgcgggcgctgcgctggcgatggaaaatgccctgcttgacgccggtgtgaccccgtcacaaatcggctacatcaatgcgcacggcacctctacgccggcgggtgaccaggcggaagcgcaggcggtgaaatccgtcttcggtgccgacgcccaccgcgtgctggtgagctcgaccaaatcgatgactggccacctgttgggtgcggcaggcgcgatcgagtctatcttcaccgtgctggcgctgcgcgatcaggcagtaccgccaaccatcaacctggataacccggatgaaggttgcgatctggacttcgtgcctcacgaagcgcgccaggtcagtgatatggagtacaccttgtgtaactccttcggcttcggcggcaccaacggctcgctgatcttccgccgagtgtaactcgcgctgtcgaacgctgatgaaagcccggttttttaaccgggcttttttacgcctgccgtttggccgccggcggggctgcgtatcgtctcgccgcctgctatcctgcgagcgtaatgaaataacccggcaacaggaggaagcatgtactggattaacggacaacgccacgatgcgctggcgccgagcgatcgcggcctgcagttcggcgatggctgctttactaccgcccgggttatcgacggtaaaatcgagctgctgccctggcatctggagcggttgcagcaagcggcgcagcgattgatgctgcctgccacagattggctggctttcgagcgggagatggcgctggcggccgaatcaattccgctcggcgtggtcaaagcgatactgacgcgcggcagcggcgggcggggttacagcccgacggggtgcgaaaacccgacgcgcatcgtcgcccgcagcagctaccctgcgcactatttgcagtggcgcgagcagggcatcacgcttgcgctcagcccggtggcgctggcgcgcaatccgctgctggcggggttgaagcatttgaaccgcctggagcaggtgctgatccgcgcgcatcttgaccagacggccgccgacgaggcgctggtgcttgacactgccggtatgctggtggaatgctgtgcggctaatttgttctggcgtaagggaaaagcggtatttaccccggatctgagccaggccggcgtcgcgggcctgatgcggcggcgggtgatcgcgctgctggcgggctcggaataccgtctgcattgcgtcagtgaaccgctggagacgctggccgatgccgacgaagtgctggtgagcaatgcgctgatgccgctgctgccggtaaacgctgcgcaatcatggcgttatgcttcgcgccagctgtatgattttttgcgtccacactgttaaccatggctgattgatgaagaaaagaaagctgaaggtcctgtctgttattgttgttctggtattagcgctgctgttttggggctaccagaagatcgaacgctttgccgatacgccgctggctatccagcaagaaaccatcttcaaactgccggccggcaccggccgggtagcgctggaagggctactggtacgcgataaactggtgcacaacgggcgctggttccagtggctactgaagctggagccggagctggcggagtttaaagccggtacctaccggttcacgccgggcatgacggtgcgccagatgctgaaactgttggccagcggcaaagaggcgcagttcaccgcacgctttatcgaaggctcacgcctgcgtgattggcagcaggtgctgcagcagtccaaatacctgaaacacaccctggcgggcaagagcgaagcggagattgccgcagcgctcggcattgctgcaggagaaaccccggaagggcatttgtacccggatacctaccagtataccgccggcatgagcgacatcgcgctgctcaaacgcgcacacgtgcgcatgaacaaagcgctgcaggccgcctgggccggccgcgacaccagcctgccgtacaaaacgccggaggagctgctgaccatggcttcgatcgtcgagaaagagaccgcggtcccggaagagcgcagcaaggtggcgtcggtgttcgtcaaccgcttgcgcatcggcatgcgtctgcagaccgatccgacggtgatctacggcatgggcgaaagctataatggcaacatcacgcgcaaggatctggagacgccgacgccttataacacctatgtgatcgccggcctgccgccaacgccgatcgccatgccgggtgaggcctcgttgcaggcggccgccaatccggccaaaacgccttatctctattttgtcgctgacggcaagggtgggcataccttcaccaccaatctggcgagtcataaccaggcggtgcgcgtgtaccgtcaggcgttaaaggaaaagaatgaaaagtaaattcgttgttatcgaagggctggaaggcgcgggtaaaaccaccgcgcgcgatacggtggtcaatgtgttgcgcgaacacggcgtcagcgacatcgtcttcacccgtgaacctggcggtacgccgctggcggagaaactgcgcgatctgttcaagcgcggcatcgacggcgaattgccgaccatcaaggccgaagtcttgatgctgtacgctgcgcgcgtgcagttggtggaaaccgtgatcaaacccgccctggcgcgtggcgcctgggtggtgggcgatcgccacgatctctcttcacaagcctatcagggcggcggccgtggcgtggatccgcagctgatggcctcgctgcgcgacaccgtactgggcgatttccgcccggacctgacggtctatctcgatctgccgccgctggtcggcctgcaacgcgcgcaggcgcgcggccaattggatcgtatcgaacaggaggcgctgccgttcttcgaacgcacccgcgcgcgctatctcgagctggcggcgcaggatgaaacgatcgtcaccgttgacgcggcccagccgctggagcaggtgactgcggcgatccgcgactgcgtctgccgctggctgcggcagcaggaaggcgcataatgaactggtacccgtggctgaatggcccttatcgccagctgattgggcagtacgccgagggccgcggccatcatgcgctgctgctgcacgcggcggcgggcaacggtgacgacgcgctggcctacggcctgagccgttggttgatctgtcagcagcgcaacggtgaaaaaagctgcggcgagtgtcacagctgtcggctgatgctggcgggcaaccacccggattatcacgtgctggcgccggaaaagggcaagagcagcctgggcatcgaaccgatccgccaggtgattgaaacgctgtatgcccacgcgcagcagggcggcgccaaggtgatttggctgccgcaggcggaacagctgaccgaggcggcggccaacgcgctgcttaaaacgctggaagagccgccggagaaaacctattttctgctgggttgccgtgagccgtcgcggctgatggcgacgctgcgcagccgctgcctgtactggcatttggccagcccggaggagcagctcagcctgcagtggctgagccggcaggcggccggctctcagacggaccgcctcacggcgctgcgcctgcacgacggcgcgccgctggccgccgaacagctgttgcagccgcagcagtggcagcagcgcagctcgctgtgcgccgcgttgagcgccgcgctgccgcagcgcgatatgctgtcgatgttgccggtgctgaaccatgaagacgtcgccgagcgcctgcactggctgtgtgcgctgctggtggacgccatgaagtggcagcaaggcgcgcatcactatgtattgaatcaggatcagcaaccgctggtgcatcagctggccagcctgttgagcagcgcctcgctgcaacagatcgtgcaacagtggctgagctgccgccatcagttgctcagcgtggtgggcgtcaaccgcgagctgctgctgaccgaacagttacttcgctgggaacagatgcttggcgccgccggctattcccaccctcactcgctgtaaagttaaagagttaaaaattatgttgttagtcgattctcattgccacctagacagtctggattatcagacgttgcaccagaatgtggacgatgcgctggccaaggccaaagcgcgcgacgtcggctatgtgctggcggtcgccaccacgctgccgggctaccgctccatgaccgaactgatcggccagcgcgacgatgtggccttctcctgcggggtgcatccgctcaacctggaagaaggctatgattacgccgagctgcgccgcctggcggcggcggagcaggtggtggcgctgggggagaccgggctcgattacttctaccagaaggataaccttgagctgcagcaggactctttccgcgagcatatccgcatcggccgggatctgaacaagccggtgatcgtccacacccgcgatgcgcgcgcggatacgctggcgatcctgcgtgaagagaatgcacaggactgcggcggcgtgctgcactgcttcaccgaagatctggccacggccgaagctttgctggatctgggtttctacatctctttctccggtatcgtgaccttccgcaatgccgaacagctgcgcgaagtggcacgttacgtgccgctggatcgcattctggtggaaaccgactcgccttacctggcgccggtgccgcatcgcggcaaagaaaaccaacccgcctatgtgcgcgatgtggctgaatacatggcggtattgaagggcgttagcctggaacagctggccgaagccaccactgccaacttttcacgcttatttcacctcgatctgtgatctttgacctaggctatagctgtaggtcattgtctgcgtaattttttttaagctcgtaattaatcactgaaacgggtaaggttccctcccgtttcaaggtggttggtgcgcgttttttgctctcttttgccaaaaaaacgccgatttatgcaaagttgccgcggctcgatcatcgaaacgtgattgtcatcaaacattgcgcaggctatttattttactctgcgtaataaattcaaggggtgctcagacaccctgaattgcaggggtttttctcccccccttgcagcgcgacgtatcgcgacaagaagtagcaaagcattattactcaggagcacactcaactatgttcaagaacgcatttgcaaacctgcaaaaagtaggtaaatcgctcatgctgccggtgtccgtgttgcctatcgcaggtatcctgctgggcgtcggttccgccaactttagctggctacctgcggtagtctcccacgtgatggcggaagcgggcggttcggtcttcgccaacatgccgttgattttcgctatcggcgtcgctttgggcttcaccaacaacgacggcgtttccgcgctggcggcggtggtggcttatggcatcatggtgaaaaccatggcggtggttgcgccgctggtgctgcacctgccggctgaagagattgcggccaaacacctggcggataccggcgtgctcggggggattatctccggcgccatcgcggcctatatgttcaaccgcttcttccgcattcaactgccggaatacctgggcttctttgccggtaagcgtttcgtgccgatcatttccggtctggcggcgatcgttctgggcgtagtgctgtccttcatctggccgccgatcggtacggctatccagaccttctcgcagtgggcggcttaccagaacccggtcgtggccttcggcatctacggcgtggttgagcgtgctctggtgccgttcggtctgcaccacatctggaacgtaccgttccagatgcaaatcggtgaattcaccaacgcggcgggtcaggtgttccacggcgacatccctcgttacatggcgggtgacccaaccgcgggcaaactgtccggcggcttcctgttcaaaatgtacggtctgcctgctgcggccatcgccatctggcactcggccaagccggaaaaccgcgcgaaagtcggcggcatcatgatctccgccgcgctgacctcgttcctgaccggtatcaccgagccgatcgagttctccttcatgttcgtcgcgccgatcctgtacgtgatccacgctatcctggccggtctggcgttcccaatctgcattctgttgggcatgcgtgacggcaccagcttctcgcacggcctgatcgactttatcgtactgagcggcaacagcagcaaaatctggctgttcccaatcgtcggtatcgtctacggtctggtgtactacaccatcttccgcgtgctgatcgccaagctggatctgaaaacgccgggccgtgaagacaccgctgccgagcagtctgcgcagggcggttccgaaatgtccgcggcgctggttcaggccttcggcggcaaagaaaacatcactaacctggatgcttgcatcacccgtctgcgcgtcagcgtggccgacgtgtccaaagttgaccaggcgggcctgaagaaactgggcgcagccggcgtagtcgtcgctggttccggcgtgcaggccatcttcggcaccaagtccgacaacctgaaaaccgatatggacgaatacatccgtaatcactgattcaggcaggggagttaccaagggaggcgaaagcctcccttttttattgcctgctttcaggcgccaaggcgctgatttagttcagcgagagaagggaggaaccagacctgttcgccgcgattggcttcacgcacaaagtcttgcagcgcgttgctttgtgccagccagggagtgatatcgcccagcagcgccacacgcaggcggtagttgatgaatttctgcaatacggcgccggccacgccgctcctcagctggaaaaaggcggcgtccaggcggctgacggggaggacgatcatctcggcctcgtgttcaaaggcgggcgcgataaacaggctgacgtcatttccatctttcagcatcggcccggcctcggcgaaaaccaccaggcgcagatcatgaatttgctgcacggcgtagctcatcggcgctccggggctcagggtttggcgtgttgctgcaggtaatgctcgaacaccgccagcgtttcgtccgagatatggtgttcaatcccttcgctgtccagctcggcggtttcgctcggcaccccgaggcacatcagcagatcgaccacgatgcggtgacggcggcgcaccttctgcgccagttgttcgccttcctcggttaaaaacaccccgcgataagggcgcgactccaccagcccggcgcttttgagccgcgcgatatttttgatcgccgtcgggtgagacacgccaaagcggcgcgcgatatcggtggttctggcttcgcgggtgctttgcagcaaatcggcgatcagctcaacgtaatcttcgatcagcgcattggactgcgcttcgcgggcgcggctaaaacgcagggcgtgctcggcctcgtccggcatgtcggtcagggcggagcggtcggcgttatctggcgcgcgggtaaccatagcgtggggcgtcctgtaagcataaaaatggcgtctcccggcaatgcggggagggttgccctaagttagtccaaatagcacacattatcaattcgatgccacgcattgtggtagttagaaatatctctacacaaagccaatgaatttcgcctgttgcataaagtgtagccgatgctacattgtcagcatgaccggtggaaaaataaccagcaaaagattaagggcaattcatgcgtgacgcggcaaccccctcatcgttaaccgaacggaccaacatcgcgattggcgccgcccttgccggacgcaagcgcggtgccttcacgccgttgctgttcgccggcccggcggtgattgcctctatcgcctatatggatcccggtaatttcgccaccaacattcaggccggggcgaaatacggctacagcctgctgtgggtggtggtgatggccaacctgatcgccatgctgtttcaggcgctgtcggccaaactgggcatcgtcaccaaccgcaatctggcggaaatgtgccgtgaccagttttcacggccggtggtgatcggcatgtggctgctcagcgaagtggcggcgatggccaccgatctggcggagtttctcggcggggcgatcgcgctggcgctgctgttccatatgccgctgctggcggggatgggggtgacggcggtgatcacttatgcgctgttgatggtggaaaagaaaggtttccgcccggtcgagctgatgattggcggcctggtgggcatcatcgcgctgtgctacctggtggagatgttcatcgtgccggtggactggcaggcggccggcctcggcatggtgacgccgcagttgccggatgcccaggcgctgaccatcgccgtcggcattatcggcgccaccgtgatgccgcacgccattttcctgcactcgggattgactcagcaccgcagccccgccagcgacaacggcgagcggcgcaagctgctgcgtttttccaatattgaagtggtgatcgcgctggcgcttgccgggctggtgaatattgcgatggtgatcatggcctcgagcgccttccacgccggtaacagcgacgtggccgaaatcggcactgcctaccatacgctgacgccactgttcggcgcagcggcggccggcatcttcctggcttcgctgatcgcctccggcatttccagctcggtggtgggcaccatggccgggcagatgatcatgcagggctttgtcggcttccgcatcccggtgtgggtgcgccgcctggtcactatggtgccggcgtttatcgtggtggcgatgggcgtcaacgccaccgatgcgctggtctatagccaggtggtgctgagcctggcgctgccggcgccgatgatcgcgctggtgatgttcacccgccgccgcgacatcatgggcgagttcgccaacggccgctggaccagtctggcggcggtggtcggcacggtggtgatcgtgctgctcaacgtggtgttgctgctgcagacctttggcgtcgatatccctggactggggtgatcttgcgggccgcgcggggcgcggccgcgtcgctaaattataaattccccacgccgccgtccatctgcagctcggcgccgaccataaaggccgactcgtccgccgccagaaacaccgccgctttggccagctccagcgcgctgcccatgcggccgatcggcaccagcgcgcggatatcgtcgcgcaaggcccgctcgtccgcttccgccaaccccagtttacccaatgccggggtttcggtcgggccggggctgaggccattaacgcgaatgccgcgcgcgtgcagctcgccggagagcgttctggccagcgataacaaaccggctttgctggcggcgtaggcgctgctctgcggcaggccgatatgggcgctgaccgaaccgcacaggatcaccgaagaagggttggccagcagcggcagcagcgcctggatcagaaagaacggccccttcaggttgatgtccatcagccgctgatagctttgctcatcccactcctgcagcgggcgatgcgtgacgtcgccggcgttgatgtacagcacgtccagccgcggccaccgctgctccaactgctgcgccagcgcgcgctgctgtgggatgtcgccggcgtcgctcagcagcaacagcgccttgtccgccaatgcctggcccgccgcgtccagggcgcgttggctgcggccggtgatcgcaaccaaagcgccctcggcgatgaactggcgggcggtttccagcccgatgccgctggtgccgccggtaatcaatgcgtatttgccttgcagtcgtgacataaccgattcctctttagcgtctgttacggcattatttgcgctatagttccttttgcatagtaggcaccttttggatactaaaggacgaggagggatgaaatgacggcgcaagcgcccttagcggcggaaaataatttggcggccttgccgacggcgggcgaaccctgcccgatggtggacttcgtcaatctggtgtcgggtaaatgggcgataccgatcttgtaccggctgattatgatcgacggcccggtgcgattcagcgaactgcagcgggcggtggcgcccattgcgcagaaagagctgacgcgccagctgcggctgttcgaacagcgcggcctggtgacgcggcaggtgtttcccgaagtgccgccgcgggtggagtatcaggtcaccgcgctgggcaaatcgctgcggccaacgctggactcgctggccgagtggatgcgtcggcatgcgccgcagctgagcggcggctagtcgccgatgcccggcgggttgatggtggaacgctcgaccttttcgtcgccttcgccccagcgttccagcacctgcgcatattcgccgctgacgatcgcgccattgatcgcggcgttgatggcgttcaccagcccgttgccttttttggtggtgaccgcgacataggccacgctggggccgatgccgaccattttggttttgccggtcagcgccgccttgtaggcgccggtggagtgggggccgaagaacgcatcggcgcgcccggactgaatgctgaggttggtggcggcgtcgtcggtcacgtagatcggttgtaccggcggcagcccggcggcgcgattttgcttatcccatcccagcagaatgttttcctgattggtgccggatccgacgatgatccgcagaccggcgacgtcctgcggccggttgatcgcggtgatgtggctggtggatttgacgtaaaagcccagcgtgtccactcggtaagtggcgaagtcgaatttggttttacgctgtttggtgacggcgatgttgaagattgccgcatcgtatttgcccgtgctgatgcccagcggccaatcctcccaggaggtgggcactaggttcaactctagcccgaggctgtcggctaccaggcgggcgatgtccggatcgctgccgatcagcgttttattgtcttcggcgaacagtgccagcggcggggagttctcgaatgccaccgccaccgtcagcttgcctggcaccgcgaagtgaaagttcgccgggatcagcgcgatagcggcgggattcttctctgcgtgtatcggctgtcggttagcctgcaggtcgataccgcccgtcgtggccgcctgcacggcggcgctcagcaacagcgcgcacagcgccgaaattctcggtaacataacgccctctatcctttgttaatcatggggttactattggcggcggcgcggggcaagtaaagcaacaatagtgaataaccaaagtgaaaagatgcacaagcggggggccgggctgcgcgaatctgcagcactcgacgtggaaagtgcgcaatcaggttgaaagcagtagaatttgtcactcatactgcgtacagctaattgtgtaaaacaaggaacgccagatggccgaagaaacgattttcagtaaaattatccgccgcgaaatccctgctgatgtggtttaccaggatgaactggtgaccgctttccgtgacatctccccccaggcgcccacccatgtgctgatcgttcccaacgtgctgatcccaaccgtcaacgacgtgaccgtggagcacgaagccgcgctgggccgcatgatcaccgctgcggcgaaaatcgccgaacaggaaggcatcgccgaggacggctaccgcctgatcgtcaactgcaaccgccacgccggtcaggaggtctatcatattcatatgcacctggtcggtggccgctcgctggggccgctgctgtcacgttaagcgaggaaatcatgcgcggtaaaaaaactctgcgtggtctgatggcgttggcgctgcccgccgcgttgttgatgggatgcagctcaccgcccggcatcgcggttaaccaagggcagacggtggtgatggatccctcggtgctgaccgccggtattctggccgatacgccctcgatttcgaacgcttccgggcgggtgatggcaacctcggtgctcaataacagtcagccgacgccggtcaccgtacattaccgtttctattggtacgacgcgcaggggctggatattcgccccttcgagaaaccgcgcgagatcgtggtggcacccgactcggacgccaaaatctactcgattaacggcaatctggacgctaaaagcgcgcgtctgtatctgtacctgtaagcgcttgccaggtttggagaaaaagcatgaaaaagtacgtcttagtggcgctggccgcattcaccctgagcggctgtctgtcgcgcccgcctgagccggaacaaccgttgccgccggtcaccgtcgagccggatcagccgacgccgccggtggagcagccgcagccgccaactaccgagccggtgccgcagccgccgaaaatccagcagctcgactggctgggcagcgttcagccgctggtggggcagatgttgaaggccgatggcgtcacggccggcagcgtgctgctgctggacagcgtcaagaacaacaccaacggctcgctgcagatgggcaaagccaccgcggcactgtataaggcgttggcgtcgaactccactttcagcgtggtgccggaagcgaagctgaccagcgccagacaaacgctgggcctgtcggcggatgacagcttcggctcgcgcagtaaggcgattggcctggcgcgcatcgtcggcgcgcagtacgtgctgtacagcgatgtcagcggcgacgtgaagtcaccggcgctggatatgcagctgatgctggtgcaaaccggcgagatcgtctggtcgggcaatggcgccgttaaacgctgaggccgcgctgcgacgattgatggaaaccagactgccggcggtgaataccgccggttgtcatttcagcccggtgcaggggctgaccggcgagagctggcgcatcgacggctcgggcgtcacgctgctggcgcggcaacatagcgcggagaaacgcgcgctgggcgtgagcaggcggcgggaggcgcaggtcctgcgtcgctgtgcgccggggctggggccacgggttttcgcacagaataatcagtggcttatcctcgaatggcttgaaggtgacgtcgtcacaaattccgaatttgacgcgctgaatcagcgcggcgagctggcggcgatggtggcgacgctgcatcggcggccgctcagcggttaccggctggatctgcggcggcaattcctccgctactggcagcagctggatacgcggcgtttaacccccgcctggctgcgcctgcagcgtcattttttacgcagcgccttgccacggccgctgcgcctggcgccgctgcacatggatatccatccgggcaatctgctcaccaccggcgaagagctgcggctgatcgactgggagtatgccgccgacggcgacatagcgctggatatcgccgcgctgtttcgcagcaacggctggtcggccgaacagcagcagcgctttttgcagcactacgcgcatcagggctatcgcgacgtcgcccggttgcaggcgcaggtgcgccgttggctgccgtgggtggattatctgatgctgctgtggtttgaagtgcgctggcagcagagcggcgacgttgaatttttgcgctggggcgctgcggtgcgccggcgattctgtttatcatcatctgaattctgaacgaacaaaatgaagtgaggtgcccgtgggcccagtaatgctagatgtcgccggctacgagctggatgcagaagaacgcgagattttgaaacacccgctggttggcggattgatcctgtttacccgtaacttccacgatgcggagcaactgcgtgagctggtgcgccagatccgcgccgcctcgcacgatcggctggtggtggcggtagaccaagagggcgggcgcgtgcagcgcttccgcgagggtttcacccgtttgccggcggcgcagtcgttcgccgcgttgcacgatgcgcaggaaggcggccgtctggcgcaggaggccggctggctgatggcggcggagatgatcgcgcaggatatcgacatcagcttcgcgccggtgctggacatcggccacggcagcgcggcgatcggcgagcgttcgttccacagcgatccgccgcaggcgctggcgatggcggagcgctttatcctcggcatgcacagcgccggcatgaaaaccaccggcaaacacttcccggggcacggcgccgtcagcgccgattcgcacaaggaaaccccgcgcgatccgcggccgctagcgcagatccgcgagcacgacatggcgatcttcagcgagctgatcaaccgccagctgctggacgccgtcatgccggcccacgtcatctatactgaagcggatccgcgtccggccagcggctcgccttactggctgcagcagatcctgcgtcaggagctgggcttcgacggcgtgatcttctccgacgatctgtcgatggaaggcgccgccatcatggggagctacgccgagcgcggccaggcggcgctggatgccggatgcgacatgatcctggtgtgcaacaaccgcgccggtgcggtcagcgtgttggataacctgtccccggtcaaagcagagaaggtgaagcggttatatcatcgcggtcagttcacccgtcaggaactgcgtgactccgagcgctggcagcaggcgcacaaggcgctcagcgcgttgagcgagcgttgggaggagcacaagcagcgttcgcaagggtgaatccaggtgccgcatcgcggcgcagagcggaaatgatgagggccgcgcccgcggcccttggcttgttgcgaggatccacatgattatctatttgcacggcttcgattccaccagtcccggcaatcatgaaaaggtattacagctgcagtttatcgatccggacgtgcgctttatcagctacagcacgctgcacccgcgtcacgacatgcagcatctgttgaaggaggtggacaaggcggtgcagcagggcggcgatgcgcacccgttgatctgcggggttggcctcggcggcttctgggcggagcgcatcggcttcctgtgcggcattcgccaggcgatgttcaatcccaacctgtacccggaagagcacatgcacggcaagatagaccggccggaagagtatcgcgatatcgccaccaagtgcgtggaggatttccgcgagaaaaaccgcgatcgctgtctggtggtgctgtcgcgccacgacgaggtgctggataaccggcgcagcgccgaattgctgcatcactactacgagatcgtgtgggatgaacagcagacgcacaagttcaaaaacatctctccgcatctgcagcggctcaaggcgttcaaggcgctgggttaacagtttcataacgctgccgcgagccgcgcgccccgtttttcaccggcggaaagtgcggcttttttgtacgtcaaagcaagattctgtgtggcaatcggcaaaatttaaaactgtgactcagcgctaactatttgaatcacaatccccaaaaaatccccgcgtccagcctttaaccaaaaaaatttgatgtacgtcaattttggtatgaccaaataacctcacatgctattctggctgcagagagccgatttattttaagcgaaccctatgtattctaaggatattatttatttaccctgggataacaaatggttcacatttagggggttattttgacaacgccaaagaagaaaatcgttattgttggcggcggcgccggtggtttggagctggcgaccagcctgggccataaacttggccgcaagaacaaagccgagatcacgttggtggatcgcaaccacagccatttgtggaaaccgctgttgcacgaagtggcgaccggttccctcgatgacggcgtagatgcgctcagctacctggcgcacgcgcgcaatcaccatttcagcttccagctggggtcgttgaccaacatcaaccgtgagacgcaaacgctgcagctggcgcagatctgcgacgagcagggcggcgagctggtgccggcgcgcgaattgccgtacgacattctggtgatggcgttgggcagcacctcgaacgatttcggtacgccaggcgtgaaagagcactgcatcttcctggataacccccatcaggcacgtcgtttccacaacgaaatgctcaacctgttcctgaagttctcggcgcagccggggcaaaaagagcgggtcaacatcgctatcgtcggcggcggcgccaccggcgttgaactgtccgccgaactgcacaacgcggtgaagcagttgcacagctacggtttcgaaggcctggacaacagcgcgctcaacgtgacgctggtggaagccggcgagcgcatcctgccggcgctgccgccgcgtatttccgccgctgcgcatcaggagctgatcaaactgggcgtgcgcgtgctgaccaacaccatggtgaccagcgcggacgccaaggggctgaacaccaagggcggcgaattcatcgacgccgatctgatggtgtgggcggccggcatcaaggcgccggactttatgaaggacatcggcggcctggaaaccaaccgcatcaaccagctggtggtggagccgacgctgcagaccacgcgcgatccgaacatcttcgccatcggcgactgcgcttcctgtccgaaagagggcggcggtttcgtgccgccgcgcgcccagtcggcgcaccagatggcctcacgctgcgccaccaatattctggcgctgatgaacggccagacgctgaagccttacgtgtacaaagaccacggttcgctggtgtcgctgtcgcgcttcagcaccgtcggcagcctgatgggcaacctgatgcgcggttcgatgatggtggaagggcgcatcgcgcgcttcgtctacatctcgctgtaccgcatgcatcaggtcgcgttgcatggctacatcaaaaccggcctgatgatgctggtgggcggcattaaccgggtgatccgtccgcgcctgaagatgcactgatcccgcttttgtcgaccaacccgcgccggttcgcccgcgcgggtttttttatggcggcgcgagccgatcggcggcggttgcttgattcttctgcataagccgtcgccggcatgggtaaaattcttaagattcctcctaaacaacgggaaaacggccgttttcccgcatttttggtccccttgtcttattgcgggccttcagatcattgtgcagactttacctcgtttacagacggcgcgtcgcgcacgccgtaaaccgggataccgccagccgcccatgcgcaaaataataagcgcggtgccagccggtaacagaccccggaaaaaatgcgtggtaacactttcaggaggtttcctgtgaacaagtcaatgttagccggtgttggaattggcatcgctgccgctctggggattgccgcggtagccagcctggacgtcttttctgccggtccgcaatatgcgcaggtgctcgccgccacaccgattaaagaaaccatcaaaacgccgcgtcaggaatgccgcaacgttaccgtcacgcaccgtgcaccggtgcaggatgaaaaccgcatcgccggttctgtgctgggcgcagtggcgggcggcgtgatcggccaccaattcggcggcggtcgcgggcgcgacgtggcgaccgtggtcggcgcgctgggcggcggctacgccggcaaccaggtgcaaggggcgatgcagaacaacgacgtcaccaccagcgttcagcagcgttgcaaaacggtctacgacaagtcccagaaaatgttgggctatgacgtgacctacaagatcggcaatcagcagggcaagatccgcatggatcacgatccgggcacgcaaatcccgttggataaaaacggccagctggtgctgaacagagcctgatcgccacattcgaattaaacccgcgggcagtgttagttctgatcgtttaacccggttaagcgagcggcgttaacattgacgcgggtttctgttttctgcctgcccaaaagtttgcgatcgttctaatgtctgcgtgcgatatcgctgggcgaaacttcaaaaaagcccctgcgtttgttatattattgtgcaattaagcggtgttatcggcgccaatcgccacaccggccaaacccgagtatttcgtctcgcagagataacgacatgttagattttcgctttccgacagcgttgcaaatggtccttagcgtcgccgtagctgagaagcagggcatgcgttcgacgagcgccaccctcgccgccgctctggaagccaaccccagctttatccgcaaactgatggtgccgctgaccaaagacggcatcatcgtttccaccttgggccgaaacggctctatccacctcggccgcccggcggaagagatcaccctgcgggacatctatctggcggtgatcgacgacaagcgcatctgggcttcccgccctgaagtgccggctcgttgcctggtgagcgccaacgcctgctggtatttcaaatcggtggtgaacgaggccgagcaggcttcgctcgcggtgctggcgcgccacaccgtggccgactcgctggccgagctggagcggggcgacaagcgcgcctgcgcggaatacgccgccgagcaagaggctgaagccgccggtaaataatgccggatggagcgcataaaaaaggtcgggtattgcccgacctttttgcatttcaggatgatgattacgccgtctgcggctgcgctttgcgggccaccaggcgccgcaaggtgacgtagaacaccggcgtcaggaacagcccgaacagggtgacacccagcatgccggagaacaccgtgatgccggtgacgccgcgcacttcggcgccggcgccatggccaaggatcagcgggatggtgccggcgatgaaggcgatggaggtcatcacgatcggccgcagccgcaggcggcaggcctccagcgccgcttcgacgatgcctttgccctgcatttccagttcgcgggcgaactcgacgatcagaatggcgttcttgcaggccagccccatcagaacgaccagcccgacctgaacgaacacgttgttgtcgccgccggtcagccacacgccgaacagcgccgacagcatggtcatcggcacgatcaggatcaccgccagcggcagcgtccagctttcgtacagcgccgccagcgcgaggaacgccagcagcaccgcgaccgggaataccaccagcgcggcgttgccctgggtcgattgctggtagctcagatcggtccactggatgttcatgccgttcggcaacagcttgccggccatttgcgtcagcgcgctcatcgcctgggtagaggagaggacgcgcggatcggcgtcgccgatcaggtccgccgccgggaaaccgttgtagcggatcaccggatccgggccgtaggtggtgccgatgctgaccatactgccgatcggcaccatttcgcctttgtcgttgcgggtgcgcaggttggcgatgtcttccacgctgtcgcggaattggccgtcggcctgcgccatcaccttccaggtgcggccgtaacggttgaagtcgttaatgtaagacgaaccgaggtaggtctgcagcgtgctgaacagcgcgttgagcggcaccccctgggccttggccttgtcgcgatcgattttggcgtccagctgcggcacgttggcctgataagaggagatcgggaaacccatgcccggcgtttgcataatggcgccggacatcgtgttgatcgcggtctgcagcgcgccgtaacccagcccggcgcgatcctgcacgtacagtgaatagccggagccctggccgatgccgaggatcggcggcggcatgatcgagaaagcgaagccttcctggatctgtgaaatgcgcgcgttgatctcggcgttgatctgcgctgcggtgcgggtacgggtgctcaacgactccagcgcgaagaacaccgtgccggtattcggcgtattggtgaactgcagcgcgttcaggccggggaaggccaccgcatcggtgacgccgtccacgctcaggccgatggcgctcatcttgcggatcaccgcatcggtgcgctccagcgaggcgccttccggcatcttcacgccgccgatcaggtatagcttgtcctgcgtcgggataaagccgccgggcacggtcttgaacatcacgccggcggcggccagcagcagcaggtagacgacgaacaccgcgccgcgccggcccagcacgcgggagacgccctgttggtagcgttgcgaaccgctggtgaagaagcggttgaacggccggaacagccagccgaacagccggtcgatcaggcgcgacggcaggtctttcggcgcgccgtgcggtttcagcaagcgcgccgccagcgccggcgacagggtcagcgagttgatggcggagatcaccgtcgagatggcgatggtgacggcgaactgcttgtagaactggccggtgacgccggaaaggaacgccatcggcacgaacaccgcacacagcaccacggcgatggcgatgatcgggccggagacctcgcgcatcgcctggtgcgccgccgccagcggcgacagcccctcttcgatgttgcgctcgacgttctccaccaccacgatggcgtcatccaccacgatgccgatcgccagcaccagcccgaacaggctgagggtgttgagcgagaagcccagcagatacagcgcggcgaaggtgccgaccacggagatcggcaccgccagcagcggaatgatcgaggcgcgccaggtctgcaggaacagaatgaccaccagcaccaccaggatcaccgcttccagcagggtatctaccaccgcgcggatcgagtcgcgcacgaataccgtcgggtcgtatggcgacttccagctcatgccgtccgggaagcgggtcgccagctcggccatcttgccgcgcaccgcgtccgacagctcgatggcgttggcgcccggcgactggaagatgccgatgccgaccgcatccttgttattgagctgggcgcgcagcgcgtagctgccggagcccatttcgatgcgcgccacgtcgcgcagccgcacgatctcgccgttatcgccgctcttgagaatgatgttgccgaactcttcttcggtttgcagacgcccctgggcgttgatcgacagcagatagtcgctgcgcgtcggcatcggctccgcgccaagctggccggcggaaacctgcacgttctgctcctgcatggcgctcaccacgtcggaggcggtcagcccgcgcgcggcgactttgttcggatcgagccagatgcgcattgcgtattcgccggcgccgaagatctgcacctggccgacgcccggcagacgggccagctcatccttgaccttcagggtggcgtagttgcgcaggtacagcgagtcgtacttgccggaaggcgataccagatgcaccaccagcgtcagcgccggagactgtttctgggtggtgatgccctggcggcgcacgtcttccggcaggcgcgcttcggcctgcgccacgcggttttgcacctgcacctgcgcctgatcgggatcggtgcccgggcggaaggtgacggtggtcaccagcacgccgtcggaaccggcgaccgatttcatgtacatcatgttttcgacgccgttgatcgcttcctccagcggcgtggccaccgtttcagcgatctctttcgggttggcgcccgggtattctgcacgcacctgcacgctgggcggcaccacgtccgggtactcgctgatcggcagcagcgggatggctatcaccccggcgacaaaaatcagtatcgacagcaccgcggcgaagatcggccggtcgatgaaaaagcgggaaaagtccatgggtcagaagtctctgctgggagcttagttaagcgtggaggcgataggattcatggcgacggctttcgcgtcgaccggcatgcccggcataaacactttctgcatgccgtcgacgatcacccgatcgccgtttgccaaccctttctgcacgatgcgcaatccttcggccatgcggcccacgtcaatgtcgcggcgctgcgccttgccgtctttatcgacgatgtaaacgaacttgcggttctggtcggtcatcaccgctttgtcgtcgatcagcatggcgttgaactcggcgctgccgggcatctgtacccgggcgaacagccccggcgtgaagcggcgatcgcggttgtcgagcagggcgcgcatgcggatggtgccggtcccggcgttcagttggttatcggtgaagtccaccagcccctgatgcggagtgccgtcttcgcctaccaggccgactttcaccggcaggcgggcatcgtgccggccttgctgctgatagcgcaggaaggtggcttcatccacgtcgaaatagacgtagaccttgtcgagcgacaccagcgtcgtcagcacgctggcgctgtcgccggcggtgaccaggttgccggcggtgatcatcgcgcggctggcgcgcccgtcaatcggcgcggtaacgcgggtaaagtcgagattcagctgcgccatatcaagctgggcctgcgccgccagcacgttgctttgcgcctgcgcggcggatgaccggcgctgctcccatacttcctgagagatggcctgagtgccgatcagtttctcggtgcgcgaggattcgctgcgcgccagggctgcctgattgcgcgcccgcaccagctccgcctgcgcctgttcgcgcgcggcgcggtaggtgcgatcgtcgatagtgaacagcacctggcctttcttcacctcgtcgccttcggtgtagttgacccgctcgatgtagccggagacccgtgggcgcagttgcacgctttgcaccgcttcgacccggccgttgaaggcatcccactggctgatcggcttgaccactacgctggcggcgctgaccaccggtggcggtggcggggcgttgtgcgcgacgctgttgtcgcacccggcgagcagggcggccagcagcgccaccccggagagccgctgacccagagcgacggcgcgcgtgtggccgccggcgttgaacgatgagtttggttgatttgccattatttttattccgataagtaagcgcggtcaggccccacacccggccctgttctccgggattcgcccccgcaccggcgtgcggtgagggggcggctgcgccgtgcagcggcgcaacgttaggttttgaaacacattggtgtcacattaatgtatcaatatcggttacattaattgggtggagtatagtggcggctttccggtaaatgcaataataaaaattgcatttaaagcgaaactgttgcaacgtatgtgcatcgggcagagggtgaccctgccgaatgatgggagcatctgcatgaacactacgggctttattaccgatttgaaggcgtggatcgacaacaatctggaagagaaactggatatcaacaccgtggcggaccgcgcgggctattccaaatggcatctgcagcgcatgttcaaacgccagaccggctacgcgctgggggagtatatccgcatgcaaaaactgaaagtgtcggcggagcgcctggccaacagcggcgagcctatcgtcagcgtggcgatctcgctcggcttcgactcacagcagtcgttcaaccgcagcttcaaacgccaattcggccaaacgccgggcgattggcgccgcgcgctggcgcagccggcgtcaatggggcgcacgcaccactgagcggttggggtgtggggagaaaaaaagcctgaatttgcgttcgggcttttttgtatggcggtgagggagggatagattcgctgcgctcaccctgcgggccgccgttggcggtccaaaacgcaggcgttttgtcgaaccctgtcgaggcttctcgcccctctcggcggtgcgccatgcaaaaaaaaacctggacgcgaatccaggctttctcttcgaatttggcggtgagagaggggttcgaaccctcgatacactttcgcgtatacacactttccaggcgtgctccttcagccactcagacacctcaccgttttgtcgtcgataacgccttgcgctgtcgacgggcgctaatgtaggagaatctgatctcagcgtcaaccctcttatttcattctcatgactgtttagccaaacttgcagcaatttgctgatttaccgaacgatattcccacgcttggccgctggcgggcagggcggactacgttcaaaacgcgtgaaagatgattgtttgacctttttctgtgcgagtagctcaatatatcgccaatgagatcggtctatttgctgttatatgcattaatactggattattagtcaaatgtgtcgctaaatggaattatgtcggcgcggcgtttttggcaaggaatatcacggcgccgcgcagattgccgggagacaggccggcgatatcgcagacagggacagactcattacataataatgcagtagaggttcgttttgactccttcagatgccatgccggcgccgcaagcgcgccatgccattccccccggtgcgggggcgctgttcttcatccagatcttcgccacactgggcttcgccgggctttactccacgctggtgctgtacgccaccaagcgattgggcttcaacgaaagcagcgccaacgccatgatgggcgtgttcggcgccttcaactatggtctgcacatgttcggcggctacctcggcggccgtttcctcagtaaccgcaatctgttcgtgctgggcatggtgttgcaggtgatcggctgcgcgctgattgccgtcgcgggcgtgtgggggctgtactgggggctggcgatgttcctgaccggcagcggccttaacgtgacctgcattaatatgatgctcacccagcgtttcaaaccggatgatgaccggcgcgaatcggcattcctgtggaactacgctggcatgaacctcgggttcttcgttggctttaccgtcgccgggtatttccaactgacggaaaactatcgcgcgctgttcctgttcgccacgctgggcaatgcggcggcgatcatcgtcgccgtctgccgctggcggattctggcggatctcaatacgccgctgcacgatgccagccgcagtcaataccgttggcgcatgctggtcgggctggcggtgctggtggcgctggtgccgattatccgcgtgatgctgacccacgccgagttcagcggccatttcgtgatcgtgctcggcgcgctgatcttcctgatgctgtgcgtggtgacgctgcgccaccatccgcgcgatgagcgccgcagaatggcggcctatctgatcctggcgctggggtcgctggtgttctgggcgctgtatcagctggcgccgatggggctgatgctgttctccgagcacaacatcaacctgaacgtttacggcattcaggtggcgccgcagtggatccagaatatcaacacgctggtgatcgtggtgggcggcccgctgctggcctggtggttcaatcgcctgcgcgcccgcggttgcaacatcgacattccgctgcagttctccggatcgctgttctgcatcgggctcggcatgctggtgctgccgctgggcatcagcatggccggcggcgacgggctggtggcgtttaaatggatcgtcatcagctatgtgctgcaaagcgtcggtgaattgatgatctcgccgatcggttacgcgatgatcggcaagctggcgccgccgcgctatcagggcgtgatgatgggctgctggatgatggtgaccggcgtcgcctcggtgctggcgggctacgtctccggcctgatgccggaaaacagcggcagtacgccgctgcaaaccaatcccggctacagcgaaatcttcagcgcactgggctggggggcgacgggcgtcggcgtggcgatgctgatcctcattccgctgctgcggcgtcttatccggcgcgacggtccgtctgccgcctgattttgcgcacatgcacaacagccccactggtcggggctgtttttattttgggctttaacgcttgcatccggcgatgaatcgcggaaggctgaaggaaaaccaataaaaacaaaccggagcccgcagtatgaacatcatctattaccaccccttgtttaacgcccaggaatggctgatcggcatcaagcaacgcctgccgcaggccgagatccgcgaatggcagcgcggcgacgagcggccggcggattacgcgctggtatggcgcccgccgcacgagatgttagccaaccgccgcgatctgaaagcggtgttcgccctcggcgccggcgtcgacgccattctcgatcaggagcgcaaacaccccggcacactgcccgccggcgtgccgctgctgcggctggaggataccggcatggcgcagcagatgcaggaatatgcgctgagctatgtgctgcgctatttccgccgtttcgacgagtatcaggcgttgcagcagcggcaggaatggcaaccgctcgatccgcactcgctggatgatttcactatcggcatcctcggcgccggcgtgctggggcagagcgtggcgcgcaagctgaccgagtttggctttagcgtacgctgctggagccgcagcgccaaacagatcgacggcgtgcaaagcttcgccggagaggcgcagcgcggcgcctttctcgacggcgtcaaactgctgatcaacctgctgcccaatacgccggagaccgtcggcattctcaaccgtgagctgttcgcgcaactgcggccgggcgcttacctcatcaacatcgcgcgcggcgcgcatctggtggaggccgatctgctggcggcgctggagcaggggcaactggccgccgccacgctggacgtgttcgcccgcgagccgctgccgcaggatcacccgttctggcgtcatccgcgtgtcaccattaccccgcatattgctgccatcacgttgccgcagcaggcgatggatcagatcgccgccaacatccgcgcgctggaggcggggcatgccccggccggcgtggtcgacaggcaacggggttactgagccttcagccgccgttcggtaactgataagctgttatcgtcatcgcgcctgtccgtacctttgcgggcgggccctctggaaggagaaacaatgtaccccgttgatttgcatatgcacaccgtcgccagcacccacgcctacagcacgctgcacgattacatcgccgaagcccagcagaagggcatcaagctgttcgccatcaccgatcacggcccggacatggccgatgcgccacactattggcacttcatgaacatgcacgtgtggccgcgccgggtgaacggcgtgggcattttgcgcggtatcgaagccaacatcaaaaacctgcagggcgatatcgactgcaccggcccgatgctgacggccaccgacgtgatcatcgccggtttccatgagccggtgtttgcgccgcaggataaagcgtccaatactgaagcgatgatcgccgcgatggcgcagggagacgtgcatatcatcagccaccccggcaacccgcgttacccgatcgatattcccgccgtcgcggcggcggcggccaaatacgaggtggcgctggagctgaataactcgtcgttcacccactcccgcaagggcagcgaggccaattgccgggcgatcgccgccgcggtgcgcgacgccggcggctggctggcgctgggttcggattcgcacgtcgctttttcactgggtaatttcgagcactgcgagcgcatcatcgaagaggtgggcttcccgcaggagcgcattctcaacgtcagcccgcgccggttgctggattttctcgagcggcgcggcaagccggcgattgcggaattggccgatttgtgacatcgtcccggcaaaattttccgtattgtataaggcattatcatgaatgagttttccattgtctgccgcgtgctgggtacgctgttctaccgccagccgcaggatccgctgctggtgccgctgttcgcgctgatcaaagagggcaagctgcagcagcactggccgctggagcaggatgacctgctgaagcgcctgcagcagggctgcgacgtcaaccagctggcgaccgactttaacgcgatgttcgtcggcagcgaatgcagcgtgtcgccgttccgctccgactacgtcgaaggcgccagcgaagcggaagtgcgcaccttcctgcagcagcgcggcatgccgctggcggaggcgccggccgaccatttcggccagctgctgctggccgcttcctggctggaggatcagtcgcaggaagatgaagcgcaggcgcagatcgcgctgttcgacgagtttctgctgccgtggtgcggccgcttcctcggcaaagtggaagcgcacgccaccaccggtttctaccgcacgctggcgctgatgacccgcgacgccatccaggcgatgcgcgacgagttggcggagtacgagcaggacgacgaagcgggcgacgaagacgcgtaacgccgcagccatccaggcgggccgcccggcccgccgatccgctaaacacaggtttgcatcccccagacgtaaattgacaaaagatcccctaatctggcggtttaccgtcggttcggccgcgcctgcgcgccgcgctttttcacgcaaggggtagatgatgaaaagtaactggatgcagcagattcaaacgttgatcgggcagaaggccggcgcgatgggcggggcggaaggcatcggcaagctgctggcgcccacggcgctgggcggtttggtcggcgtgctgttggccaacaaatcctcgcgcaagctggtgggcaagttcggcaagaatgcgctgattatcggcggcagcgcggcggtgggcgcggtgctgtggaacaagtataagcagcgggtgaaagagacccatcaggacgaaccgcagttcggtttgcaaaccgcgccggtggatctgcgcgccaagcgtttggtgcaggcgttggtgttcgccgccaagagcgacggccatatcgatgccgacgagcagcgcgccatcgatcacagcctgtcgcagctgcaggtgggggaagaggcgcagggctgggtgcaggaagcgctcgatcagccgctcaacccggaattgatcgcccgcagcgtgcaaaacgaagacgaggcgctggaggtttactacctgagctgtctggtgatcgacgtcgatcactttatggagcgcggctacctcgatgcgctggcgcaggcgctgaagatcccagcggacgtcaagcagggcatcgagagcgacgtcaacgagaaaaagcgcgagctggcgtagcgccgcttggcaagccggggggaatcgtgtcactcttgccgcaatctatgtaagcggatgatttagcaatgatgaccccaccgaaagcggaaaaacgcccttatcccatcaccattcacggcgacacgcgcgtggatgactactactggctgcgcgacgacgagcgcgcagaccgccaggtgctggactacctgcaggcggagaacgcctacaccgatgcgatgctgaagccgcagcaggcgctgcgcgaaaccctgtacgaagagatggtggcgcgcattccgcagcaggaacattcggtgccttacgtgcgccacggctatcgctatcagacgcgctatgaaccgggcaacgaatacgcgatttatgtgcgccagccgcaaaccgagagcgagcactgggaagtgcttatcgacggcaaccagcgcgccgagaaccacgagttttacaccctgggcgggctggacgtcagcccagacaatcagcggctgggggtagcggaagatttcctgtcgcgccgccagtatgacattcgtttcaagaacctggccgacggcagctgggcggacgaagtgttggaaaatacctccggcagcttcgagtgggctaacgactcctcgacggtgtactacgtgcgcaagcacgccaagacgctgttgccgtatcaggtctatcgccacgtggtgggcagcgatccgcagcaggatgagctgatttacgaagagctggacgataccttttacgtcgggctggagaagaccacctccgagcgttttatcctgatccacctgagcagcaccaccacctcggagatcctgctgctggacgccgatcgtgcggacgccaagccgcagctgttcgtgccgcgccgcaaggatcacgaatacgccatcgatcactatcaccagcatttctacatccgctccaacaaggacggcaagaacttcggcctgtaccagagcgagcaggcagacgaagcgcagtggcagacgctgatcgccccgcgcgccgacgtaatgctggagggcttcagcctgttccgcgattggttggtggtggaagagcgcaatgccggcctgacgctgctgcgccagatccactggcagacgggcgaagagaagcgcatcgccttcgacgatccgacctacaccacctggctggcgtataacccggatccggaaaccgcgctgttgcgctacggctattcgtcgatgaccaccccgaccacgctgtacgagctgaacatggacagcggtgagcggacgatgctcaaacagcaggaggtgaagaacttcacgccggaaaactaccgcagcgagcgggtgtgggtgaaggcgcgcgacggcgtcgaggtgccggtctcgctggtgtatcgccaggacagcttccagcgcggcgccaacccgctgatggtgtacggctacggctcttacggcagcagcatggatccggcgttcagcgccagccgcctgagcctgctggatcgcggtgtcgtgttcgcgctggcgcatattcgcggcggcggcgagctggggcagctgtggtatgaagacggcaaactgttcaacaagcagaacaccttcaacgactttatcgacgtgaccgaaacgctgatcgcccaggggtacggcgacggcaagcgggtgttcgccatgggcggcagcgccggcggtctgctgatgggcgcggtgatcaaccaggcgccgcagctgttccacggcgtggtggcgcaggtgccgttcgtcgacgtggtaaccaccatgctggacgagtcgatcccgctgaccaccggcgaatacgacgagtggggtaacccgaacgagcaggcctattacgactacatcaaacagtacagcccgtacgatcaggtgaaggcgcaggcatacccgcatctgctggtgaccaccggcctgcacgattcgcaggtgcagtattgggagccggccaagtgggtggccaagttgcgcgagctgaaaaccgacgatcggcagctgctgctgtataccgacatggatgccggccacggcggcaaatccggccgcttcaaggcctatgaggatattgcgctggagtacgccttcattctggcgctggcggagtaacggcgaacagcgggcggcctgcgccgcccgctgtgctagccaatcagatagtatttcagcgtgtgtttcatgtccgggctcagatcgtcgatggatttcagcatccagcgcagatagccgggatcttcctgggcgatgcgatcgatttcctgcccgcgatacttgccgaatttgaacttcttcagcagcaccggctgttcggtgatctgcaccatttgctccggcgtccagcccgaatccttgatgatgcgttgcagcagcgcggcggtgacgtagcagtcgtacagcgcgcggtgcgggtacagcgtggcgtctgccggcagctgcacgtccaggttcagcgcgtagcgcagatactggttgccgtacttgatgtccggatacagcgtgcgcgccagcttgagggtgcagatccaggcgccgttcatctccggcaacaccccgcgatcaaaggcggcgttgtgcgccacatagtaggggctgccctgatagcggccgatcgccaccgcaatgcgcggtttgccttccaccatctgttcggtgatgtggtgaatagccatcgcgtcgaggctgatggggcggtccgggctgaccaggtcgctcatcggattggttaactggccgtcgagcagatcgagggaggccacttccaccacgccgccgtccagcccgcaggtctcggtatctattacgcgtaacgtcatgctttcctccgcgttgccgtcaggcttcagcttaaccggcacaggcggccgtgccaaccgtcgaaagtcttgccggcgatgatcagcccaggagcgtcatccggcgcggcaaccaaaagcgctcccgtttcatcccagatggcgctgcggcctgccgggatccagccgccggtcggcgccgcatggttggccatcagcgtgaccatgccgtaacgccgggcatagcctgccagcgcggcgctgtctttcgcgtaaccggcttcagataccagcacgccggcagcataaatctgcgcgcccgcctgtgcggcggcgcttgcgtggccgggctccgaagtatcggcgcagatggccagcgcgatgcgctgccgatgtatttccagcagcgagccgccatcgccgggcaagaaccgttgccgttccgcgccgtgcagatgctgcttggtatagggcgtcaatgcgccattggggtgaaagatcaaggcggcgatatgcagcgcctggccgctgcgtaagggcgcgccgacgatgatcgtcatctgatgcgattgcgccgccgcagcgagcggttgcagacgcggatcgcccagcgtcagcgccagttcggcagcatcagccagttcatagccgctgagcgacagttcgggaaacaccagcagctgcacctgctgttgggctgcctgcgcgacaaattcaaggtggcgttcaaggttacaggcgatatcggccgcagcggcggggtattgggcggcggcgagggtgaagcaggacatcggccatctctcctgtgaggcaataaaaaacccgccttggcgggtttaatgacggatggaaggacgcttactcaccagacggatgcgcttttttggcgcgtttctccgcacgtttctctgctggggttttcaacggcttcttcttcgcattttttttgctatccattcccttactcatgatggcctctcgttacctatgattgggtggcttgctcagccattaaccgcctaaagccggcaggatgcaagcgacaaagtgcgaattgcacttaaccggctgtttgcacgtgaaattttgtttttggatgaccgggtgataaaaataattattatgttataatattacactttcaatattcggagaacgcaatgactgtgatggcattaccggatgcgcagcaactgctggccatgccggattctgattatatgaactcggttcaacgggcgtttttccgtcagctgctgcaggatgagcggcaaaagctgctgctgcacatcgatgagctgaaaaaagagatcgatggcggcgaagcgacgggcgatgaggccgacaaggcggcgcgcgaagaggatttgcgcctgctgttccgccagctggatcgcgaaagccgcctgctgccgaaaatcgatgcggcgctggcgcgcttgcagaacggcgaatacggctactgccgggaaaccggcgaacccatcgggctggcgcgtctactgctgcgcccgacggcggagctgagcatcgaggcgaaaaccgcgcaggagatgcgtgagccgcatatgcgtaaaggcgggtaaggtctcagccgccgagcgtatccaccaacagatcgagaaagcgcctgacgcgaggttccagcaggcgcttattcggatagagcgccacaatcctgacttcttcacccgccacggcgcgcaacacctgctgcagacggccggcggccaggtcctccgcaatcataaactccggcagatacgcgatgcccaacccggacagagcggcgtcgcgtaacgcttccccactgtctagccgcaggcggccgcgcaccggggccttgacccattcgccgcgctcgtcgcgcagccgccagggctgtttttggttgcggctgctgaacagcagagcctcatgcccggcgagcgactcgacggtaagtggttcgccacgggcggcgaggtaggcgggggaggcgcacagcagggcgcgatacctggcgagggttctggacaccagccgggtatccggcgccgtgacgccgatccgcaccgctaaatcaaatccttcttccacgatatccgccaggcgatcggaaaaactgatctccacctgcacctcaggccaggcgacgagaaatttcggcaccagcggcaacaggatccgtctgccgaaggcggcgggagcggtcaaccgcagcaccccgcgtgcggtgcctttgtcgccggccacgctggcctcggcgtcgtcgaccgaagcgaggatctgcagaccgcgccgataaaactcccgcccctcgtcggtcaggccaagtgaacgcgtggtgcgatgcaacagccgcacgctcagccgctgctccagacgcgcgatggctttgcccgccgccgagcgcgacagccccatcgtctgtccgccggcgacaaaactgccggcgtcgacgacggccatgaaaacctgaatgtcattgagattcgcccgcaacatgccgccccccgagattcgatgataagataattaatttaacatattcaatgaattaactgcatatccaatgtcgtttcagtgacgacgtccattcgccaatcaaacgattatagtcgccatggaaacgataaacggttggagaagcagcatgaaaaacggcatcacgcactaccatcacggggtcatttgggaagaggagaatggcgtgtcccaaggcgttcgcgtcaaagacaccctctatatttcggggcagttttcccatgatatgcagggtgagtttatcggcgcgggcgatatcgaacggcaaacccaacagacgttggacaacctggatcgggtattggcgggattcggcgccgaacgttcgaacctggcgtatgtggagatctatctgactgacgtacaggcgcattttgaaccctgcgttgcgttgttcaaacgctatgtcggcgctcaccggcccgccggttcgctgatcggcgtcaccgggctggcttcgcccgagcagttggtggagatcagcgcgattgcgcacctgaactgatcgggcctgtgggcgttttgcaagcaggtcgttgtgattttgagcaaacgcgcgccgagttcccggcgcgcgttcgagttttcgggttttaccgttgacctgccgggcggcttccgctttgatgaaagcatgactcacagagagacggaaagcgccatggaacaattacgaggtttgtacccgccgttagcggcatacgacagcggttggctggacactggggatggccaccggatctactgggagctgagcggtaacccgaacggtaagccggcggttttcattcacggcgggccgggcggcggcatctccccgcatcatcgtcagctgtttgatcccgaacgctacaaggtgctgctgttcgatcagcgcggctgtggccgctcccgtccgcatgccagcctggacaacaacaccacctggcatttggtggccgatatcgaacggctgcgggaaatggccggcgtcgaacaatggttggtgttcggcggttcctggggctccacgctggcgcttgcctatgcgcagactcacccggagcgcgtcagtgaaatggtgctgcgcggcatcttcactctgcgcaagcaggagctgcattggtattaccaggacggcgcttcgcgcttcttcccggaaaaatgggagcgcgtgctgtccatcctctcggatgacgagcgtaaagacgtgatcgccgcctaccggcagcggctgacctcggccgatccgcaggtgcagcttgaagcggccaaactttggagcgtgtgggaaggggagacggtcacgctgctgccgagccgcgaatccgcttcgttcggcgaggatgattttgcgctggcgttcgcccgcattgaaaaccactacttcacccatctgggcttcctggagagcgacgaccaactgctgcgcaacgtgccgctgatccgccatattccggcggtgatcgtccacggccgctatgacatggcctgccaggtgcagaatgcctgggacctggccaaggcctggccggaggcggagctgcatatcgtggaaggggcggggcattcgtatgatgagccgggcattttgcaccagctgatgatcgccaccgaccggtttgccggcaagtgacgcaaaaaacccgccgtaacggcggggttttttttttggcctttggctcgtacggcaggcgcgaaaacctgtgggattccgcgcggtagtgcgccacgcgctcgcgaaaatagtcgcgcagcgcttccggttgctcgcgctccaccacttccgggatcaccggcatgttgtagcgctctttgtacgccacgcctgaggcggcgagatccacattcaccctgtccatttcctctttggacagctcggccagattgtaacccacgctatgctccttacttactttgccgcattgaatctgcgcagaaggtaatccacccggcggcgcttggcaagcccattacgccgttgccgggagcgatatttatccgagagtaatgcaatctatttattcttttaaataagaatgattcgctttttgattaaaataaaagatgaaaataattatcatgtgaattctcaacgtggggttgatattttaatttattgatatttatgatttttataattaatgtttgcttggtgtgaataatgtgtttttatttttacggcagcaaggcataatgcgcggaaattaaattcatgacctgcaaaataaaaggaatcattatgctgacgcaagaaatgactcaaaagctgaatgagcaactgaatctggagttctactccgccaacctgtatctgcagatgagcgcatggtgcagcgataaaggctttgaaggcgccgccgcatttcttaaagagcattctcaggaagagatgcagcatatgcaacgtttgttcgactatctgagcgacaccggctctctgccgctgctgggcaccatcgccgcgccgccggtggcgtttgagtcgctggcggacgtgttccagcagacctacgaacacgaacagctgatcactcgtcagatcaacgaactggcgcacgccgccatgaccgcacacgattactccaccttcaacttcctgcagtggtacgtggcggagcagcatgaagaagagaaactgttcaaatccgtgctggacaagctggcgctggtgggcaccagcggcaagggcctgttcttcatcgacaaagatctgaagaaaatgggcgcgatgggccagggcggcaacgaccaggcctgatctgcaccagagcatcgaaaaaccgcgcgcgggcgagcctgacgcgcggttttttttaccctgcgtttatcgcggttatgcggcgatacgtgctgccggatcgcaaaatgccagtgatgcgctcgacttgccgcggcgtggtcgttatgatttaccgcgatacgctacagggatggtagagtcaaaacagcgggttagccgatacaacccgtttttctgtttacccgtggcgcaatcattgcggtgggttggggccgctgatacatcgccttggctgtggccttaacccttatgaccctctttatattgttaagggataccactgtgatcggtaaaattcgttcctcttgtcgcctgctttccaccgttttcgttctgttcgtttgcctgtcttcgcagcaagcgctggcgcacgcccacctgaaagtggaaacgccgaaggctgacgccagcgtcagcccggcgccgaaggcgctgaccctcagcttctccgaaggcatcgaaccaaacttcagcggcgtgaaaatcaccggcccggacaacgccgtggtgaaaaccggcaagctgcagctcgatccgaacaacaacactcaggtcaacgtgccgattgaaggcgagctgagcgcgggcaaatacaacgtcagctggcatgtggtgtcggtcgacgggcataaaaccaaaggccagtacagcttcaccgtaaactgatcgtgactctggcgaccctgttcgttctgtgtcgcttggtgcactttgcggcggtgatgctgatgttcggcatcagtctgttcaccgccttattggcaccgcagcgcctctccccgatcctctcccgcgatgtgcgtccgctactgcttgccggcacctggattgccgggctttccgccgtggcgctgctggccattcaggccgggcagatgggcgacggttggcaagacgcctggcggctggaggtctggtgggcggtgctcggcaccaccttcggcgaagtgtggcgctggcatctgggcctgtcgctgctggcgatcctgagcctgctggtgccggaacggccgcgcgcgcaggcgttggcgctgtgctcggcgctgctgctggtgagcctggcgttcatcggccacgcggcgatgcatgaaggcgcgctgggcgcgctgcaccgcgccaatcatgcggtgcacctgctggccgccggttactggttcggcagcctggcgccgctgctggtttgcctgcgttacctgcagccgccgcagtggcgcagcgacgccatcaccacgctgatccgtttctcgcgctgggggcacctggcggtggcggcggtgatcgtcaccggcatcgtcaacagcctgattattctcggcggctggccgcttaatctcggctccccttatcagcgcctgctgctgatcaaaaccgcgctggtggcgctgatggtgatggtggcattggccaatcgctacgccatcgtgccggcgatgagccgcgtaccggcgctggcgcagcgcggtgtggtgctggcctgctggctcgaagtcgggctggggatggcggtgctgctgctggtcagtttatttgcaacctatgcgccggtatgacatttcagcttgccgcaaccggccaagctgcgggaaaatcggcgcgaatagcaaccttaaggccatcacatgaaatcggtattactcggcattacgctgctggcaaccgcgaccggcgcgctggcggcagacaaactggtgaacatcaccaaactggagtacggcaaacagtgggcgttcaccaaggaagaggtgacgctgcagtgccgcagcggcggcgcgctgttcgtgctgaataacagcaccctgatgcaatatccgctcaacgacgcggcggagcagcaggtgaagaagggccatcagcgcgcgcagccgctggaggtgatcctgctggacgaccctgccgaaccggggaaaaaaatgagcatggcgccgtttatcgaacgcgccgagaagctgtgcgctgactaaccgcttgtttgccaacgccttgcccagcgcgcgcagattgatgcgcatttgccgcatagttatttcgtcacgaaactatcacgcggccgccgggcggctggcaaaactggcgcggtaggctactcttaaagtgcacggctgaacaagccctgcattaaatgccaacttttagcgcacggctctctcccaagagccatttccctagaccgaatataggaatcgtattcggtctttttttgagttgttgattttaaaggatttattttcgtttgtccgaaaatgtccgaaatatgtccgaattttgatattcggtcttttacagcatcacgtactctttccccctcgttttaagatatttcagcgtcatcatttccgttgtatgccccagcagcttttgagcaaatgccttatcgttctgcttttcgtacaggcggccggacaggcttcggatctcgtggaacgtcggcgggctttcctgaaattccaaacctgatgctttccgcgcggcgacaaattttttcgttaacccgtcgggatggatcgaaccatcttggctatttttcctgatgccggcgctgatcatgaagtctgtcgtgctgaccaatcggcattgatcgataacggtgccaagccgcaggcccatacatttcagttcaagatcaagggggagggagagcaaagcccccgttttgccttgttcaacctgcaggcgcccgtcaacgatatggctaaagcgcatttgtgtcagatcctcgcggcgttggccggagaccagcgcgagatccatcgccaggcagaaccacggcggcattgtctccgcagcatctcgaatcggcccgtattgcttcagctccagacgttcgcgcttcacgatagctttcgccgcgcgggtcggggtcacagggttgttttcgatgtggccttccacgatcgcctcgcgaaaaatatcagacagcaccgatcgcatggttgcggccattgtctttttgttctgggcgatccaaaactcgagaaattcggcgatgtggcgtgtcgtgatttttgtcagcaccatgtcgcccaggcgttcccggataatggcaatttggccggtgcgcactttgtatgtgttctcggccagttctcggcgcttgaataggacatcgtaccgatcgagccaggcgtttagcgtgtattcgtggctgcccttgattttctccaggagcagaatgggagagtagttttgctcgatatagtggttggcttcaatcgcctgggcgatagcctcgcgtcgcgaaatctgaccgagagagatctccttttttgtgactggattgcgccagtagaacgcgttccggtttcggcggaatgtcaggtttttcggtaagcgcatgtcataaccctcccttcgccgtgccattgatcactttctccatgaacgcgagcctcgcgggatttgggctctgcgcttcctttatttttctccccaggttgaagtccttggggttgatgtaaatagtccctggtgtcagtcggtactgcttgccgtgcttctccgccggcgggtaaaagtttccgttgcgcgcccagcgccagagggtctggatgcttggttttttatcggtgtagttatcatctcgccattcttcgagagtcatccatttagccattggtcatgcctcactactcagcacaaccggccacaatattagccgtggccggcgttgtgcgttgattttccaaaatcagccctgaaactctgggcgcatatcgtcgagcgcaagctggaaacgctccatgtcatcggcgcttagatctcgctctgaccgtcgcaccagcgcctctaccgcggcgaactcctcggcgctccggcagtctttcagctggctgctgatgctgccgcatgcggtgatctgccggtggcgcttaatcactttgtttttcagctcggtgtaagcggcgatccccagcttttgacgtaactcttcaacctgtgcgcggatatttgaggcttggtctgttgtttctgcctgatcgatagctgtccgaatgccgccggcaatatcatccgtatcgacaggcggggcgctctgctgtacgggtgcggcggcaggtccgtccgcaagctggctcacactgacgcgcgaggtgccgcgctgcgggttaatttcgcgttcttccgtcttttccaactcgtcaatcgtgtagacgccgagaatcacttccgggcagtacaggcgcgcccagcgcttcactgccagataggccagttgttggcgcggatcatcagcccaaagcgtagagttgcgggtgcgggcctgcgccagcatgagtactaactcccgcggtttatcctcccccctcagcgttgcccagacgcggatcccgatcccttcttcatcagccaggcgccagccaggaatgcgatactcccctttatcccctttacgaatatcaaatttgccgatcaccttttcccacggaccgaaccagtcatagttgatgcggtcgaccagcggcccgcgggtggaaatcactgcattaaccagttgcgcctcgtacccgagaacgccgctcacgatgaacgttttctgagccaccgcgaaggggttcatttgccactgggcggcctgcatggcgatcgccatgcagtcggccgggttccctcgcagatgggcggggatcgtcgctgtaccgctcgccatgacctgcgcaaattggttgatagcggtcaggtattgcgggttgaacagcgcgatgttcgagtcagtgaccgatgccgttttttcttcaggaatgctgatattgctcatattgtttttgccccttacgcaacgcgcagcgcttccatgcggcgctggtcatagtcgtttaagtcgtcgacgatctcttcggtgatcggtgccggccaggtgtcggtgtcgaatgcgtttttgatgtcgcgcagcgcctttttgtactcaagccggccaagctcaagcaggtcaggagaagcctcgacgatagccacccagtgatagccctcgtctttgttgacgaagatccagaagaactggtcaaaggcggcgatgtcgctatacatggcagcgctgaggtggtagtcccgatcgataatttcccggtgcagcttggcgcgcagcgcgtcttgcttcacacggcccatgctgactgatttcaaatccacaccgacgcgcacgctgttaagatcgatctcaaggtcagggcggacgcgaacctcgaggccggtttcctcatcaaagccgaaataacttgcttcaaccgcacgctgctcatgctgcagtagcggacccgctgaaggatgggtaaacagcgcacgctgaatggctttggcgtgttgcatttgctgctgggttaccagctgacggccgtcatcagagtttttccaggcatcgagcagttcgtcggcaaaaatggctgttggcagaatcgttttgatgcgcgccgccatgtcttctttgttcccgctgaccgacagcggagccgggatcgcagcttcacgagccgcaaactcaggatcgatgattgccagctgctcgagtagcgcatcgcggccaccgctgaccttaagcggttcaggcagcgtgctgttgtactctttgatgcaggctttcatggctgtagcagtgaatttctggccgtcaggaatggtctggaattccggcggcagcagggagtaaattcggcctatttcgtccgcattaccgcccagcgcgtaaggtgttggcagcttcgcgttgtgttcatcaatgacggtgcgcagagtgtccgtatccgccattttcggcagcgtttcattgtgttgttcaataaaagcgcgcattgaggctgtattcgtgaaagcgccttccgggataatcggctctacgttgaaatctcgctcgagattctctggctcaagcgccagcgtgtgcaccagcgagccgaacgtcagcgcgtcgctgcgttctcggccgatcgttttgatgacgtggcggccgtggtagtacatcaggctgatgcgtgcatctttcacttgggtgctgctgatgccgtttgccgcgtgataggcagcattcgaaatatcagcgtaacggcctggctcgaaatatgccggctgtagattccctgcaggctcactttccggctgcagcgccacctcagctttttcaccgtcgtttgaggtgtcattgcatgtctgctctggcatcggctgctgctcggtatcttcgctcggctcgctatcaacctgtactgcagccagcggggaggcctcgaaaagagtggacacatcgaagcggccaccgcctaagctgacaagctctggctctggctctggctctggctctggctctggctctggctctggctctggctctgcaaccaaatgcacggcatccggcgccgctccgaattcatagacgccatgctcagacaaatatttctcaatccagccgcggagtgtggcggggaagtggtacatatcagacgatggaacattgcggaccacgccgaaaattgtctcacggctgtattttaggatgttcggggcagcgcgtagcgccattgaccaacgcttaaagtcctcgtcatcgttttttatttttttctgcgcccagcgatcgatctcaccggcgatattttggcagtcgacatcaccgacccacagtgcgcaggcgatctcacggtcaagggcgtcatgcgtttgggtatagccgcgcttatgtacggttttcgtcgtttctgcttccggctccggggccggtttcagcaactgctcaacgtacttgcgaatgttgatgaaagtcgattcaggatcggtttcttcatagcgacgcgcgaccccggcaacgaaagccgcgaaacgctcaggatccatgcaggaaacggctggcaggcgaagagcctgcagcatatcggcaatataagcggattcgccgctcaatgcggtgttgattacattggtcatctggggttttgtcagcacagtgtcgatcacctcgaagccgtgcaggatgacggcgacagcccgtgtgtcagcgctcatttttgcgaagtaagcgcgcggctcttggccgtgggctggctccccgccgtcattggtcgtctggtctacctgtggcttttggctgctgctggtttctgccgcaccagcatcacttgcaggtttgtgctgctcctgcacttgttcgcgctcagttgcagggatgacctgccaggacaggttatcgtccagcttgtagcgcaggcaccaggtatcacagaacgccgcttctggcggcagatcgtcaacaacggggtaattggttcgtaccggcttgaagtaagcggattgatccagctcggcgtcctcgatatggttttcgaggtcacgctttgcccgcgcatcgttctttgcttcaaaccagatgaaaagcgagggtttccctgacttttgctttgcccttaagtgataggcgtagacgttttgcattgtgcaattctcctgagttttaggtagaatgcaggccgatcggtgctgcatcctcgatgtggtcattggtcatgcctcggctgttagggttggtcccctggcagcccgtcaccgggacgttaagccggtagactggcccgccttgtgcgggcctttttacttttaatcgcaataactcattcggcagtgcggacaatcaataatgtgggtgctcgctgccttttctacggaaattcctgaaacaaagtcgccgtgtttattctcaactggaacataaacatctttgttgcaacggtaacaaatcccgtcaattggcgagaaattcggaaggcggttgtcattgcaatattggctctgagcctcaattgctaattcagtgttgaaagtttgcattatataaaccctctctttggtgatattgaaatacgccctgcgagttgacgcccgccaccaggtggaggaaacgccgggcgcatttcaatacggccggttacccggcctgatttaattacctgttttcttctgggagataatcggccaaatcaaggcgacaacaccgattactaaaacaccgtcagccaacatcgacataattcgactggtaaaatcgacggcaacaaccaaaaataacaggacgataactgcaagccaccgcagcttttccatcagatatattgatccagtggcagctgcagggcttgggcgatctttttcagcgccgcttcttcttcttcaccgatcccgtcttgatcagcaatatccaggcacaagcacagcacatcaacggcatccgccgtgccggcaacatcggccagttcacgcatagcttgcgcgttagcgctgcgtggtgaggcctcatagcgtgcgcgaatgttgctgctcatctgggcaatctcaccggcaaacggcgcaaaggcggggagtgcactgatggttttttccagtacggcgatctctttggcgtcgcaggtgccgtcggcatatgcgatggaataggcgccccagacagtggcctcgactgcgtcgcggttttccatttttttcacttcaacaactgctttgcgggctttctttttgaacattccgaacatgttatttctccagttggttggctttgtgaaatgcatttattaatgcacttcaaaaagccccgccatcgctggcggggaagactacacacagcaattaatgtcgggttgcgttactaaaaattgaagcaaggaataattttgctaacattcccattggattatcgttatcgatcatgatgcaattatcaccgagatttaaatgagactttaacgcagcattagtagcgtgctcttgacagcaaaactcaccaagagtttcgccattaggcttaactacagaaactggtgtgtcttcatttttctcattgataaccaaataccccatattttccccgccagtcgtcatggaaaaaatatcatcatgaattctttttacatggatgcttactgaatgtgatttcatggtcatgcctcataaggttaattaaatgggttgccggttacgtttccggcgccagaatatggccgttccctggtgtgctgattaattcacaacgcggtcgtgcagttcttcgacgcgcttgctcattgtgcccagctgctccttggtgccgttcaatgcatgagacagggcatgacccatcacctcattgaaggttggctctttggccttcggtttggattgctccgccagcagcttaatctggctctgcatggtttcggctgcacgcagaacggcagtaccggacacgttctcgactttggttcccggcgcctgcagctggagctgcaccagcttcgcgcgcttcactacttcggcgatcactgccgggatagtgccggccagcaggtcggcagcggggcggagatctgcgtcggccgaaatggtgtctttgccatacaggcggatcaggcgctcaacggcctcggcatccggcggcgtcacgttaatgatggcgtccagtcggcccgggcggagcatcgcagggttgatgttctccaggtggttcgtggtcaacacggttatgatattgtttgccttggtgtcgataccatcgaggatgttcaaaatgtcatccatagcgacggagcgctcaccgctgacagcacggtcgatgtcttcacagaaaatcacgcaggccgtttcctgatactgcttggcgaactcaatcgcgtcagccagctcgtcggagcgcggcacgtacagatatgtgacgccgttgtcggttgccaaacgcgaagctacggtcgcagccatcgttttaccggtgccgtatggcccgcccagcagcacgccgcgtttcaccggaatgtcgttcgcgatgcagtcggtaatgcgctcgatcggcgtgaagaggttggtttcgatcgcttcggtcacttcacgggaataaaccagcatgtcgcggctaatggacgacgtgtccaagaacttcggttctggcatttcgatcaggtcgccgtcgtcatcgcggaagcgaattttgatggccttaccggcatagatggagccacgtttcaggatgttggcgatatcgtcaaacagctctttgatgacgctttcgtccttacgctgaatttttgctgctgtcacaaagcagatgcggccgtcttttcgatccgaatcagtctgaacgaaaccatcgatgccaggcaggctgaaacgtccccacggaatttctttggtttggttcggcccgacttcaatgttgatcatcgctggcggttggctaccaaaaaagcccggagttgactcggccgctgcccagccgaaacggttggttaatgcctgtgccaatgcgtttgcgccgtcccacgggaacacgttaaattcgcggcggatgatcactttctcgctcaggtaatcacggcggcgctccagcaaatcgatcgcatcctgaacgcccataccgacaggaatagtcagtttttcgccgtggtgaacaacttcggcaacgtgaacctgcttttctacttcattcagtgacttagacatcatttgttcctctgtggttatgtcagaacaccccgttctgactttggtcatgccgtgtttggtcctgcccattaattcgggcattttttactgctgtttcaggtggtgctttagtgcgtgccggctggctcgaattccggcgggatccgcagggattcaaaagggcgcttgatggcccgtagattgccgaccggttcgaaccggtagcggccgcggatgtaatcgaacgatgctacccacggcgcgccggtgcgcgagttgcggaggctgacggccttaccgctgtttgggacgatcttggtcatggtcacgcctccctaaatcagtgctgcggtagtgatgacgctggccaaaaaaacgaggcaggcgccgacaacaatcaaaaaccagaaacctctgttgctcatgattgcctcggtgcgccccttagggcgcaacaggtttactttccaatcagaagaagcatgtcttctgcagtaattgccgtcagtgcctcttcataccgatcttgtgcatcatcaagggtttcgatgctctcagcgtgatgttttgcatgaaccaagtttttggccgcttcttcaagtcttttacgaacatcctgtaaacgtgttgtttcgcccatcgtattgccctctgctgtgtggtctgttggtcatgcctcggtgctgtctttccagctgtcagaacgtttttcacctgctgcgttagcgaatcatcccggtcttcgtgcgccccgggcggctacttcgtgggcttcctgcctgttcgccgctgcttgatgtaattgattaagccaaagacttaggctcatgtcaagtctttggcttaataaatgcttaagtcataggcttatactgatcagttaagtcgtggggttaatgaaaggcacaaaaaaaccggctcgggccggttcggtggggaagtgattcaaaaaaaccggctcgatggccggtttagttttagaaaatcagttttgctacagtgagggctaggccggtagtgccgataattgttgctgctatccacttggtttgtttggatatctcttcgtggagatcagctttggtaacataattggacttgataacggcaatgtcggttaccagggtaaggacttggtcttcaagtttttttacacgatctaacatgtcattacctcctccattaccaccgccatgctgaaatgatgcactatcatcgctgaactgtccagcgactgactctggcgatgtccctctgatgtaggagatttttgaattactcattaatagctccctcatcaattatgttgaacaaaatttcttttgtatcaatggggtttccaaagtcgtagagcagatttatcaattggcacgtaaatgtgtatgtgccgtactcttttacatcaaaatagaaattcgccgacaggaacgacgttttccattcgggatgaatttcacatgagggaaggccggccataccattggatgtcacaacggtttcacctgagggatcaaccaagatgaaggtaaccaaatagttctcttcttggttaagttccaagaatgaaacccccatactcatggctaaccgtccattcttaaccatgaagtttagagtgggcgaatttgcaccatgactattaaatcttgcagggaaaataaaggctatttttccccttgcttcttcacgtggtcttgtattcattcgtcaccaaccggcttataccgcccgcgcagatacttctcaacgtaatcatcgatctcttttagtcgagcactgaatacagccatcatatttttttgttctacttcaggtaactgcctgtatagcttcagcaactccatttcatcttggttcagtccgctgctttcttcgacattatcaccaagtaaccatgcaactgatacgccagtagcttctgcaattgctatggcagatttcttgctgataactccttttttaaaccaaccattaactgactgaggagtgacgtcagcgatcctggccatctctgacttagagaagccccgcttggtgagttcggtaaggcgctcaaacaaggttgagtcggcgaaatttttttctttcattgcaacatgataagccttttgcttaaacaattgaatcagccaaaggcttgacttgttattaagtctttggcttaatcatctcacttctagaccggagagaattatgagtggtttaactaaagcaattcagatagcgggaacagcatccaacctggctgctctattaggcattaaacctatgtcagttagccgttggaaaactcgttacaaaggggcagtccctgcggatcgcgtactgcaaatttataacgtaacaggtgtcactccccacgagttaaggcccgacctttaccccaacccaacagacggtttaccgccagaacagcaggataccaagcctgcagcctaaggacatgatttatggaaatcaaacacgagcaggtccgcgacgcgctgcgcggatgggccacggaggccactcagcgcacggtcgcggcggaaatcacccgcgcttacttcaagttggaaatgcaggcgccgcagctggcgcagatagaacgcgccgacggcagcgttgatgatgctgcatggcacaacaacaagcagcagatctttcgctggctcgacagcgatagtgctggcgcccgccagaaaatccaggaactgcagccggcgatccttgctgcgctgccggcggtgctgcgcgcccggctggtggcggggaacagcatcgaatacctggcaatccgcgcgctgaaggaacaccaggaggcgatcgccgccgcgctgctgcacgcatcaccggcagattttgaaagagagtgcgacgaagcagagcgcagcttctacgagctgcggcgagcttacagcgcactgcattaaccgaggcatgaccaatgaccattaatcacgacgatttcctgcagaagcagatcaccgcgcgtgtcagggcgccatgtggggcgccagtaatctggtaatgaaatttaatctaagcaaaggcagcgccaatggctcgtattcgtaccgtaaaaccagaattttggaccgacgagaaggtggtggaatgttccatcgcagcccgattgctgttcattggattgttcaatttcgccaatgataagggctgtctggagcgttcgcctcggcgtatcaaaatgcaggttttcccggcggatccgatggattgtgaaccgctaatccaagagctaattactcatgggttactcactgaatactcagtgaatgatgtgcagtatttgcacatttcaggatttttaaagcaccaaaaaataaaccgtcccagcaaaacaagcatccctatgcctcccggattcaatgagaactcagtgagccatcacggacaagtcactgacggaaaggaagggaagggaaaggatctaaaagataaaaccctctctctatcgggagcgggcgaaatttcaccagatggacagggagcagggccgacaccctgggaagaccaagacgacgagaacccatgcggaaaatttccgatgagcgccaactgggcgccgacggttgatttccagcgattggcggcgttgtggggccgaattatcgacggcccggcgccaggatataccccgcaggagctggcgagcttccaggcgtactggaaagccgagggcagggtatttaaccagacgcagtgggagcagaaattcgccgacagcgtgctctacgagcgccaggcggcggccaaacgaaagcagcatgcaggaggttcaaatgcgaccagatacaccgcagcagccgctaccgctcagcagcaggtcagggccgcacgaaacgcagaacgggagcgacagggcttggctcctctgggagacgatggcggggatctacgccaaccgctgggtgaccaagaacggggtggcaccatccacgatctggggccagacgatttcgaaattctccgatgaccaactggcctacgccgcgcgccggtgcatggagcgctgcagcgccggtaaccactggccgcctgatcttgcggaatttactgcgatcgtcggcgagtgcacggccaacccgttcggcttgtcggcggacgacgtcatgaccgaataccggcgttggcgcaacgaatcttggcgtttcgacggcgcagatagtttcgactggcgccacccggtgctgttccagatttgcccggagctccgccgcgccggcgtagagcgcaagctgggacacaacgaactcgccgcactggccggccggctgctggcgaagtgggcaaagcaggtggaaatgggattctccatcccgccagtgcgaaaaacgaaagcgctggagaacaggccgccgggggacgcacaagtcgctgacacggacggacgctatcagcgcaagggcatggaaatgctggcacggatccgcgccagcatgggtaacaacaacgtgaaataaccgaggcatgaccaatgaccagaatcactacacggcagtttgtcgaacttatccagggcaaaaatctctcgactgcagagatcagcgccctaacgcatgaaaaacacccagggaacagcatgacacgatcgcagatctgcattcggctgaaatcgatgctccggtcgccaaacgtgaacatgatccggaccgggcaggggaacaaggcgcgctatcacgtgataggcgtgaatgagcgtttctacgagctgggggaagttaatttccggccagccgggcagaaaaccaggccggacaaaacgctatggcacttcaacccggtagaactgcggttttgccacatgcacaaaatgtttgatcaggcgctggctggcgttcgtgggagggcttgctgatgttcggtttattcctgctcgtttgctacacctaccagccgtgcgattacgttccgcaggggtgggtatatcccgatcgctccaactgcctcgaagatattcggcagcagtccctcccggcgcagtatgagtgtttgccggttgatggggtaatttcagctgctcgtcgccttgacaaggataggggggcggagcggtgatctggtggctaatttttgcgtttctgtttgccattggcgccggcgtagttggcttgtgtttcagggccattgttggtgtttgcttcgctgacgatgctggcgaccacccggagcgccgcaattacgactaattcttaaacccgctccggcgggtttttgttttgctgcacaccacacaatttactgtttatatatacagtattttggtgtaataattaaaacacgaagtgaatccgagaatgtcggagaagaatataatggatgtaaaacaagatgttgctcatattttgcccgagaatggtcgggcgctggtttacatgacccacggggcgataactgcggttttaccgctgaaggagagccagatcgtcgccgatactgagctcatgattgtgctgctccgacgtatgggctacgacgtccggagaaagtgatataatcctctcatcagcctgaacagctgatcacctgctgcgccaccacggagacgaaaatggcgcagtattcgttttacaaatcccaaggcgggatcctcgtgccggcaacgcccgacacggccgatttcgtcacgaacaaactcaagctgggggcggtcgtcactggcgagtttaagcgcgcccggaatcccggactgcaccgcaaatttttctcactcctgaatctcggttttgaatactggaccccgactggcggcgcagtatcaacgtttgagcgccaatttctccgcgggtatatcaatcgcctggcgcgccatgttgacgatgctggcgtgttctatgcgctggcggacgaatacctgcagctggtggccgagaagcgcgccgaacggctgacgattgcaaaatccttccacgctttccgccgatgggtaaccgtcgaagcggggcattatgatctttttgaactccccgacggttcgactctgcgcgagccgcgatcgatctcattcgcaaaaatggacgacctcgaatttaacgacctgtaccaggcagcgcttaacgtgttgtggaccttcatcttaaacaaatccttcccaaccatcgccgaggcagagaacgccgcggctcagcttatggattatgcagcatgagcaaactgacagacgaggcccgcggccgtgattgccaaatcaggatccccggcatctgtaaccgaaacccagaaacaaccgtcaccgcacattatcggctggccggcacctgcggcacggcaataaagccagacgacacacaggcagcgtgggcctgcagcgcttgccacgatgaagtagaccgacgcacgcgctttatcgacgccaacgacgcccgactgatgcacgccgaaggcgtcatgcgcacgcaagaaattttgagaaaggaaggaaagctatgatctaccccgacaacatcggtaaaggcaacggcaaagagctgcatttgcgtgcattggagcgcgtttggatacaagggcggctgaaaatgtggggccggtggtcagggatggaaagtttcggcagggccggcaacatgtttaaccgacttctgacgagcaacaaggtgacaaaagcggcgatcacccaggcgctcaatcagctgaaaaaggcgggatgcgagcaagaagaattgcgccagtatttgctcgacattctggagggaaaacaaaaaagcagcctggcattttgcactgattcggaggcggcgattatggatcgtgtgatcggggccgttctgctggattacccaggactgaaatttatcattcagcagcgctatatcgggaaaggaaaaagcctgaaggagatggccgcagacttgcatgattaccgccctgattggtgtatgcgcacctgcgagacgcgcgtcgcggtgtgggtgaaaacggccgaattcatgctttaccgtccgatgagtgatgcatttgagatgaatagcgagcgattttatcgttgactttgcgcggaaattgattaaattgatataagcttcgcgaagttatatccgcagcgacaaattcaaaagaaacccgccatcgagcgggtttttcattcgaagcgcaagacgtgctttaaacctggaggagggtttagcatgtttgatcctgaagtttgtcagcccgctcgtttcattaaatttaatagcttagatacgagtggaaagtttttctctcttatttgccgcgtctaccttgcaaagaacgctgatcctgatggaatgattcatgtgaactatgaaggattttgcggaggttaccctggtgaaaacttcttgttaaagctatcggattcattgcaagaggctagtgataagcccggtgtttgtatcccacaccgtcttagagaaattcttttagaatcgaatttaattaaatgacaaattcataactgattattggtggcccgcttaatgcgggctttttcatttttacgttctgatgggcgccccggagagttgccgctccccgaggcagtatgcccgcgtcaacagtcacgagcacacccctctattggagtgccgagacattgaaaaatcattcaaatgctgttgtgtcacgcgccagcggaaagcccgcgccgatcgtctatgctggcgaaaccgtcggttatggatgtgacgatctccacgtcgcaacgatccccgtttggcttgcccgcctggtgatcagccattttcactacagcaagcgcgtagtgaataactcctatctgcaccttgggattttcgacggccgcgaactggtgggcgtcatgcagtggggctacgcaatgaacccgagcagcggggcgcgcgtcgtgaccggcaccggcaaccgcgaatacatggagttaaaccgcctctgggtgcatgatcggatgccgcgcaatactgaatcacgcgcaatcagctatgcgttgaaaactatcaagttgctctatcctgcggtggattgggtgcagacgttcgcagacgaacggtgcggccggttcggtgtagtatatcaggcgagcaatttcgattacgtcggcagccatcaaacgacgttctacgagcttgatggcgagtggtatcacaagatcgccatgacgacgaaagggcgcaaggctggcgcccgcggtaatttcctccaggagaatgcacaccgcgccactgcccatacgttcaaccaattccgctatatccgctttttgaacaagcgggcgcgccggcggcttaacacgaaattgttcagcccgaagccgtatcctaaacccgaaatttcaccctagcccggctgccgtcgggctttttcatttctgcactgcccgccgcggcccgcggaggtggggatcatgaaaatgaacgacagctactcgaacgctacctattggcttgcgggcatatctgcctttttcgccgggttaacgctgcaggactggggtttcatcattggcctggctgtcagtatcgccctgggcatattgacctaccgcctcaatcggcgagagcagatgaaacgaacgcagatcctgcgcgacattttgagcaagaccaacagcgccaacccatcagccaccgcgacaatcgtcgcagaattgggccaaaaagctccgagagaaatctgatgaattccagcctgagaaataaaatcgtcgctgccataaccggtggcggcggggcgattgcgatcgccactgcaatgctcggcggccacgatgggttagagggccggcggtatgtggcctatcgcgacgttgtcggcgttctgacggtctgcgatggacataccggcgccgatattatcctcggcaagcgatacagcgacgcagaatgcgatgcgctgttgaaatctgacctgcagaaagtcgcacggattgtcgatcctgcgatcaaggtgaaaaccacggaaacccagcgcgccgctatttactcgttctcgtacaacgtcggcccgtatgcgtttatcggctccacgatgctgaaaaaattgaatgccggcgacccggccggcgcgtgcggtgaactgaagcgctggaagtatgccggcggcaaagagtggaaagggctgatcacccggcgtgaagtcgaaaacaccgtctgcacctggggccaatcatgaacggctggatgagcaagatcgccggcggcagcctggtgcttctgttgctggtggctatctgccttggcggttacagctcgctgttatcgcaccagttgcagctggcacgccagcaggccgcagaacagcagaagacgctggcacagcaggccgggctgatagctacgctgcagacgcaagatgcgcagaatcgcgcgctgatggcggcgcagcaacaacgcgagcagcagctgcgccagcagcacgacaccgcccaaaggaaataccgtgaagcgattaaaaacgatccctgcgctggtcagcctctgcctgccgctgtgcttgagctcttgcgcccggccaccggcacagcccccggcgccgttaatcctccttccccctgaatctgtattcactctatgtgagcagccagaaatggccggcgatacatggggcgacgccgtcagctatacgctggcactacaaacctcactgaaaatttgtgccggcagaattgccacgctgaatgcctggcgggccggattactggagaagacgagtgaaaaaaaatgatactgacgtgctggctgtcctgctggtgggcggcggcgccattgccattgtgatcggtctgggcttgctgttctcctggggcatgctggccgcgtggaatctgttggcgtcatccgctggctgggcgtccatcgtgccaattaactggggaacggtattcggcctgatgctggtgatcatcttcgtgcgccagttgctgcgccgcaaaaaagagtaatgcacccaaagcgccgagccgtcgccgttctcctgccttagccacgacccgggctcctcacggtgagcgagcgggagaaatcaaaaacggttaataccccgcgagctagggggcggtcatagcggaaacatcagccgtggtagaagaaacggtgtgacagccggagagacggtaagtaaacaactacttaataaagtataaaaattagtgttaaattaagatgtcacttatttacttagaggtaaaaatggcatcctggacttgtccatattgcggacagatagctactgagaaggcggttcctgcaaaagcagaatctatgatttttcgagaagatactcgatatggcacggctattatgatgacttccatcatagagatgtgccctaatgacgagtgtaaggagattgtggtttcatcagatctctcaaccgctaaaattgtggatgggaggtgggccccacaagagaggttagacgcttggaagttgcggcctcaagcagccgtaaaggtatttcctgattatatccctaaagcaatccttgatgattacaaagaggcttctcttatttgtcagttatcaccaaaagcttcagcaacactagcgagacgttgcctgcaagggatgatccgtgacttttggggtgttaaacctggtagattggttgatgaaatagaagcgatagaagacaaagttgatagtgatagttgggcggctattgactcaatcaggagcattggaaacattggggcacatatggaaaaagacatcgacttaattgtagatgttgaacctgatgaggccggattacttatacagcttattgaagtcttgctcaaagattggtatgtcgaaagagaagagcgcaagaaaaggacaaataagattgttgagcttgctaaagcaaagcaggcggaaagaaaggctgtcaaaaactagacccgccacggcgggttttttattgcccatcacagagcatctatctaggtgctgcgtaatgcgcaagcaaagccacaggcgacacccaccgatcactcagatcatggttgcccgtggctttttttattcacggagaacgttatggcaaaacaggattggggagccattcaaaagctgttcctcgccgaatacgccaaaaccaaaatctccccgaaagaatggtgtgaggctaacggctacaactacgccacagcacgccggcacataaaaatccctgcgcaagggaaagagaaaaaagcgcagaaaaaaatgcgcagtgcgcaagatgcgcaaattcccgaaaatcccgcgcccgttacacccggcgtttcagttgctggcggcgatgaggaggggaagggcaaagaaagcccaagccttttaaaaccacagcatgaacaatttgcgcagaacattgcgcaaggcatgccgcagaaagaggccgcgatttgcgcaggctacgcgccgacgaatgccgaatcgcaagcctcaatcctgatgagccggccggacgtaaaagcccgtgtgcaggaactgcgcaataacgctgcgctgttggtttccttcaatgccggccacctcgctgaactgtcgtataaatctgcgcagttggcgctgcagaataaaaaatttggtcaggtcgcgccgaacgtaaaaaacgccgcgcagctgaccggcatcgacatgagcacgaataaaaccgaggtgaatgtcgatctggcaggcctgagctacggcaaggtttgcatcgtgaccccggcgaactgcccgacggacgtgtgggctgctcacatggaaaagctgcgcgagggaaagccgacggcccagtcataattgacggcgttctgtacgcattcagcagtgactgggcgacagacgtcctttacgacgccccgatcggttccgtgcgctggcgctggacctacggcggccgcggcggtggtaaatcggtagagattgctcgcgcgctggttatccttggcgctatcgatccgatgatcattctctgtgcccgcgaattccagaactcaatcagcgattctgtgctggcgctgctggaggccgaaatctatgccctgggcctcaaccatttctacaccgtaaaaaataacgagatcaccgggcgcaacggcacccgattcacgttcaaagggctgcgcaccaacctgcaatccatcaaatcgatgtttggcatcaaaatttgttgggtagaggaagcgcagaccgtttcccaggatagctgggacgttctcggcccgacggtgcgcgccaataattccgaggtctgggtttcgtacaacccgcgggaagccactgacccgacctataccctgatgaagcgccacgaggtcgatccaccggacggcggcgtcatcattcgccaggtcaattatcccgataacgcgtttttcccagacgtgctccggcaggaaatggagtattgcaaacgcgttgactatgaagcctatgagcacatctggttagggctgccgaaggcgctcagcgaggcggttattttctcaggaaaatatcgcgtcgaggcatttcctgacgatctctatctgcaggccgaccggcttttctatggcgccgacttcggcttctcgcaggacccttccacgctgatccgctgcttcatcatcgggcgaaaactctacatcgaatacgaggcctacggcgtcggcgttgagcttgacgaaatgccgcagttttacgattcgatccccgaggctcgcaagtggccgatacatggagactgcagccgccccgaaacgatcagctacatggcgcggcaaggcttcaacattgacggcgccacgaaatgggccggcagcgttgaggacgggatcacctacctccgcggcttcgaagaaatcgtcatccatgagcgctgcaagcacatgatcgacgaggcccggctttattcctacaaaacagaccgcctcacgggtgaggtgttaccgatcgtcctcgacaaacacaaccactgctgggatgcagtgcgctactcgctggacggttatatcaccagctccgacggcctcggcacctgggcgcaattgggtagacaagacgcatgagccaaaaaaaagacggggtgcgcgcgtggttccgggacagttaccagaacttcacggcgcgcctggggcttcgcacgcccaatatgagcagcgacggcacctatcagccgaattggaccagccgcaaccgcctgcagatcgagaacgcctaccgcagctcctggctggtgggcgtggccgtggatgccgtcgctgatgacatgacccgcaaaggcatcacgatcaccggcggtttgaagcctgaagaaaaatccaagctggataacgcctgggaggagttggcgctctgggaccgactgaacgacacgattaagtggggccgactctatggcggcgcgatcggcgtcatcatgatcgacgggcaggacatgagctcgccgctgcgtgtggaaactgtcggcccgggtgcgttccgcggcgtgatggttctcgatcgctggatggttaccccgaccacgcaagagcgcgtcaccgacatggggcctgatttcgggacgcccaaattttatcaggtggtgacgacggccaccgggatccccccgtggaaaatccactacagccggatcattcgtttcgacggcgtcacgctgccttaccagcagatgctgaccgagaacgattgggggcaatcggtggttgagcgcatcttcgatcgtctgatggcattcgatagcgccaccaccggcgccgcgcaactggtctataaagcgcacctgcgaacctactcgataaaaggcctgcgttctgtgctgggcatggggcagaacactgctgcctacaaagggctgatggcccacatggacatgatccgtcagtaccaaagcatcgaagggatgacggtcatggatgccgaggacgaattcgcgacccacagctacacgttcgccggcctgtccgacgttctggcgcagttcggccagcaggtcgccggcgcggtaggaattccactggtgcgcctgttcggccagtcaccggccggattctcgaccggtgaaaccgacctctccaactactacgacaacgtcagcacacagcaggagcgccggctgcgccgcccgctgcataaagtcatgcaggtgctgcacatgtcgctgttcagccggccattaccggacgatttcgccttcgaatttaatccgctgtggcagatgagtgaacccgatcgcgccggcgtggctgtgaacacggttgaagcggtgacgaaagccgtcgacgccgggctgatgacgctaaaagccggcgcgcagcagttgaaggaatcgtcacggatcacgggcgtgggttcaaccatcaccgacgaggacatcgaaaatgcgcaggacatcgacccgccggcgttcgagggcaacgatctcgacccagacgccgaaggggctacagcgccagtacgcaacgcagctacgaaagatagcgcaggtggtcggggacatcgtctcgacttcttacgatggttccgataattccgtcatcctcatcaacacccgcctgacccgttacgccgaactgatcgccccctgggcggaatccgttgccttgaaaatgtttgatgccgtcgcgcgccgagaggcgacgcagtggcgccagatctcgcaggaaatttctgccgggctgcgtgttcagatggagagcacctcagcaggccaggtggcgcgcaatatcgttgaggaaaacatcaagctgatgaaatcgctgccgctgcatgctgctgaccgggtgagcgggatccacgcccgagccattgaggcgatgatcagcggcgagcgcagcaaagattttgccgctgaaattttccgaagcggcgatgttgcatggtcacgcgcgaagttgatcgccaggacggaaataggccgcgccacgcaggcgctgacgcaagcccgggcgaccgctattggctccgagggttacatctggcgaacggcacacgacggcgacgtcaggcactctcacgccaaaatggaaggcaaattcgtccgctggggtgacccgccgacgcttgacggcatgaccggccacgccggcgcgctgcctaactgccgctgttactgcgaagttgtcatcccggaaaaataacccatgaaatatttctttaatacccggctcggtaacacccgttacgagttagccgacggctccctattgtgcgaagccgtaccgatcgcgcgggttggctggcaggtctacaacgccgcagaactcgacgagatcgaacctgaccgcgatgacgaaatttccgtttatcgctcccccgaagaagttttccgcccggagacgatcgcctcattcgaggggatgactttcaccgttttacaccctgagcaaatggtcaacccgtcgaactggcgggagaacgcccacggccacgcgaccaatatccgccgcggcaccggcgaacagtcggatttgttgctggcagatctcgttgtgaaaagcagcgaagccatccaggcgatttatcagggcgtggatcaaatctcctgcgggtacgacgccgaatatcggcagacggccccggggaaagccgagcaatacgacattgtcggcaatcatgtcgcgctggttcctgccggccgcgcgggaatccgctgttcaattggagatagcagaacaatggcaactaaaaaaacgtggtttgattcgctgcgccgcgcgctgaaaaccaaagacaacgcggcgatcgaagaggccatgagtaatgcgccggccgaactcaccaccgatgatggcgagggcgggggcgatttgccgaaggccatcaacatcaacatcagcccgcaatacccactcccggataaggatcccgagatgggcggcggccagggcattaccaaagacggcgaggaggacgtgcctgcctgggcgcaagccattctcgcgcgcctggataaattggaaggcggcggcacgaacgacggcgaacccggcgacgatgacgacgaagaggaaaagaaaaaggcgaccaccgacgccggctatcagcaggcggtgatcgcccgggctgaattgctggttccggggatcaaactgcctgagggtggaaagctggcgacgtttaaacgcgaagtgctcgatgctgcattccgcacgcaaaaaggcgcacagatccttgtcccgttggtcggtgacaagcccgattttaaaaccatgccgaaagcgtcgctggatgccgcatttaccgcggccagtgaaatcgccaagcgcgccaaccagcccgcagcccagctgcgcaccttcgaccatcaaaaccgcaactcaccggcagcgctgaacaaagccttcgccgaatactggaaaaaataaggtaaaagccgatgactgcttacacgtaccggatgcctgcgggcatcgccggggctgtttcacgccctcatcacctcactgcagagcctgtcgcgctgaataacgccaaagcgttcggcgcttacggcctggcgggtaaagacgtcggcggctatttcgtgccgctggaagccggcgacgccgtcggcgtgatcctgggcttctacattcgcccgtacccaaccacctcgacgcctgatctggtccgccaggtgggcaccgataaaaacctcaccggcgaccgcctgcgccgcggctacatgaccgtgaatgtcggcgttgacgcatctggcattacaccgcatacgccggtgaatatccgcatcgccaatccgagcgcgacgagtccgcttggcgcgccagtggccgcagccgtggctgatgaaaccgtcgtcctgccgaccgcatttttcaccggccccggtgatgccgctggcaatgtcgaaatcgaatacaacatttaaggaaatcgctgattatgtcacttcatacctttgaccaggcgaccgtagacagcaccggcgcatttctgatcggcgagctggaacggctcgaccaagaactgaatatgccgctggtgggctatacgtggagccgcgatattgagctgcgcgaggacgtgtcgatcgctgacgacatttccagctttaccaacaccgagcttgcggcatccggcacgccaaacccgaacggcaaaaactggatcggcaagaactccaccgagatcgcgaccgttaatctcgacatcaacaaaaccggtttcccgctgaccctgtgggggatggaacttggctggactgttgtcgagctggctgccgcgcagcaggtcggccgcccggttgatgcccagaaattcgaaggcatgcaactgaagtggaacatggacaccgacgagcaggtttatcgcggcgatacgctgatcggcgtgaaaggcctggtgaactacaacggcgtgttgaccaccaacgccccgaaagtctggacggcctcaaccgctgacgaaattcgtcagtcgatcaactccgtactgtcggccgcctgggcaaactcgggttacacgatttgccctcgcgatttgctgctgccgccggatcagtttgcgctgctctccagcatcatcgtgtcctctgccggtaaccagtcgctgctgacctacctgcagaccaacaccatcgcctaccaccagaacggcgtcccgctgaacatccgcgcagtgaaatggctgaaaggtgcgggcgcagccggcaaggatcgcatggtggcctataccaacagcaaaaagttcgtgcgattcccaatggttccgctgcagaacatcccgattcagtatcgcggcatctaccagctgacaacgtactacggccgcctgggcgccgttgagtccccatatcgcgaaactctggcttacgtagacggcatctaaaaacagccccgcaaggggcttataggaaaagcaaatgaagcaatcactggtaaaaatccgcgtacatacgccgttctcatttacccatgccgattaccggcaggaggctttttctgctggtgttcactcggtggcaccggaggtggccgaaaactggttcacgcaggagcatgcggagatcgttgacggtagccaaccggaaaacaccggtgtgccagcggaggcgctggcgcagatcgccgacctgcagaagcagctggcggaggaaaaaagcaaagtagccgacctgacgacggaacgtgacgaacgcgatcagatcatcgccgagcacgtcgccaccatcggcaaatgcgatgacacgatcgccgacctgcagaagcagctggcggcggcgctgactgagggcgcgaaaggtggcaaaaaataaccatctgccgaccgtcgaaaaattccgcgaagatttcccgcagttcggcaacgccgtcacctttcccaacgctcaaattcaattccgcttaaatctggctgaccaactgctcgatgaaaacaatttcggcgaggtattcccgtacctggccgagctttttgtcgcgcattacatggcgctccaggcggcggataaccgggcggcggcgatcggtggtggtggcggggcgaatagcggcgttgtgtcgtcgaaatcggtcgacaaagtcagcgtgagctatgacagcagcgccacgatgaacccggacgcgggcttctggaacaacacccgctatggggccgaattctggcagctgatccagatgttcggcatgggagggcggcagctatgaaaagtgggttgaaggtacgggccgatcggtcgcaggccgttttttctgcgctgaatgaaatcgcgcgccgcgacgtgctggtcggcattcctgaggcggcatcggaccggcaaccggaagacggtgaaaagcccgggataggaaacgcacagatcggctacatcaacgagtacggatcgccagcgcagaacatcccgccgcgcccgcaccttcagcccggggtgaaatcggtgcatgccgagaccaccgccaaaatgaaggctgcggcgcaagcggtgtttgatggtcgcgccggcgctgcgactgcggcgctggagtcggccggcacgatcgcgagccaggcggttaaaagctacatgaccagcgccgattttacgccgctgtcgccagcaacgctaaaagcccgggcgagccgagggcgcaaaggtgcggctaaagaattgcagagccgggccgccggcaacgcgccggacaatgtcaacgctcgccccctgatcgatgaagggcaataccggcgcgcgatgacctacctcgtgagggataaaaatgccaactcttgacgttacagacgtgctttttgatcccgagttttgcgacacctccctgattgtcacccgcaaccagcagaccgtcgacgatgacggcttcgccaccaacgccccggtaaaaatgccgtttgccggagtggttaccgtcgatcggtcgctcgaagcgcggcgcatgatagcgggccaggtggtcaccggtgcaatcctgattgtgaccactgagcggctcaccgccgggcagacggcgcgcgacgcggacatcgtgacctatcagaaccgcgattaccgggtgaccttcgtcgacccttacacggcctacggtgcgggattcgttcaggcgcattgtgagctgctgccgttcgatggagggatccccgttgagcaataacaccagcacgcaggccggttacctgacgccaatttcgcccggccctgattatgatgaggcgctcgaacgtgcgctaaatcgttgggtgctcggtataaccgggctgccgccgggcaacgtgcggccgcgctggacacccacacagccaccattgatgccgccagatgtggactggtgcgccgtggggatctccggctttatcggtgatgataatccagcgtttacgcggcagaacgacgacagcgcggaattgtggcgccacgaggtgaccgagtgcctggcgtcgttctatgggccgcatagccagcgtatagcgtcaattttccgtgatggtttaacgctgtcacaaaataacgatcagttgatcgccgtcggcctgtcgcttggcagcattggcgacatcattcctttccctgaactcatcaataaccagtgggtgcgccggtatgacattaccgtccgcctgcgccgcaaagttgttcgcgaatacggcatcaagccgatcgcagaggcaacggtaaaattcttcggagaataattatggctcagcaggggttacctgttcgtaacgtcgtcggcgttgcgattaatatggccttgcgcgcggcgcaggctcgaaactttggttcgttgctgattatcggggcatcgccggtgattgacgccagcgagcggatgcgcgcttattccggcattaccggcgtgcaatctgacttcggcatccaggcgcctgaggcgttagccgctcaggtttactactggcagcgcccgcagccgatcgatctgtacgttggccgctgggtgaaagtggacactgccgccgcgttgcgcggggcaatcctgaatactgcgcaacaggcgatgaccaatttcaaaaccgtgaccgatggcgcgatgaaaatcagcgtcgatggaacggtcaaaacggtatccggcgttgacctgtcggcagagaccaacctgaacggcgtcgccgcgcgtgtggctgaaaagctgactgcggcgagtgtcgtctgggatgcgaacaacgcgcgctttgttgtgacgtcgaaaaccaccggcgaggcgtccgcagtcggcttcgctacgccaaatgccacgggaaccgacatttcctcgctgatgggcattcttgaaggcaccggagcgaaaattatcgcgcgccagccggcggaatccatcactgaatgcgtcgcgaaatttatcgacctgtcgtcgaaatggtatggcctgtatatcgccgagacgatttctgatgatgacgtgctcgcagttgccggcctgatccaatccgatgacgtttcccgtatctacgcccacaccacgcaaaataccgccgtgctcgatgcggacaataacaccgacattgccagccgcctgaaagctgccgcttttggcacaacctgcgtgcagtattccagccagagcccttacgccgcggtgtcgattctgggccgtgcctttacggtcaatttcgccggctggcgcacgacgatcaccatcaaatttaagcaagagccggggatcgtcgcggaaacgctgacacaaacccaggcgctgaccctgcagcagaaaaactgcaacgtgttcgtcaattacgacaacgacacggcaatcctgcaagaaggcgtgatgtgtaacgctgatttctttgacgagcgccacggcctggactggctacagaactacgttcagaccaactactacaaccgcctctataccagctcgacaaaggttcctcagaccgatgagggcattaccgatctgctgaccaacgtcgaagcatcgctggcacagggcgctgaaaacggcctgattgcgccaggcgtgtgggggggcgacggtttcggcgcgctgaataccggcgaaacgctgacaaaggggtattacgtctactccccgccgattgcacagcaggcgcaagcggagcgcgaagcccgcaaagccccggtgatgcaggtggcaatcaaactggccggcgccgtgcacttcggcgacgtcatcatcaacgttaaccgctaaggagctggtgaatgtcaacttatagctttttggatgtgtccgccaatatcaccggcgtgggcggttcgattgacctcggcaacggtgcagcgacttcagacgaggggattgtcgttgcaatgggcggcgacaaaaacacgatggtgaccggcgccgatggcgaggggatgcacagtctgcacgccgataaatcgggcacgatcaccgtcaacctactcaaaaccagcccgacaaacgccaagctgtcggtgatgtataacgcgcagtctttgtcatctgcgacctggggcaacaacgtcatcgtgatccgcaacaaatccagcaacgacgtgaccacggcgcgcggcgtcgcgttcaagaaattgccggattggcagaacgccaaagacggtaacaccgtcgcctgggtgttcgactgcatcaagatcgaccaactgctcggcacgttttaaggggtaatgcatggaatttgaaattaagggccaaaaataccgcgcggccaaactgaatgttttcgagcagttgaaagtttcccggaagctgctgccgctgctgtccggcctgctgggggaaattaaggtgttgcgccagctgaaaaccggacaggtgtcgattgaggatgcgctcaaagtggcgctaccggtgatcgcccaaacgctggcagacatcagcgacgatgacagcaacgcgattattcatccctgcctggcggtggtgtcacgccagaatggcaccgtctacacgtcgatctttaccagcggtcaactgatgttcgatgacatcgacatgatggacatgctgcagatcgtcgcgcgcgtggtcggggactcgttgggaaattttttgcccgcactccccgacagcgagacgaaagaccagccgccggcctgacgctggacgtcctgccgggcggcgaggattacctgttacgcccggtggatgccggcatgtgcagctttgaggcgctcaaggatgggcgcctcgatttgttcgacgtcgcgctgatgaatgattacctggacatgaaagcggataacgaagcccggatcgccaggtggagagaggatcaatgaacgctgaaaccatcaaggattttttgatttctctgggcttcgaaatcgactccaccggcgagcgaaaattctctgctgttgtcgccggcgtcacggcgaacgtgctcaaaatgggggcggcagtagaaggggctgcgctgacaatcgtcggttttaccacgcagatcgccaatggcctggataaagtctattttgcatcgcagcgcaccggcgcctcagtggcgggcattcgcgcgttgggatatgccgcctcgcagatgggcgcagacgcggccgctgcacagggctcgctggagagtctcgcgagattcatccgtaacaacccgggcgccgaaggtttcctgaaccgcctgggcgtgcagacgcgcggtgcgaacggtcagatgcgcgatgccgccgccatttttaccggtgtcggcgataagctgcgcaacatgccgtattaccgagcgaatcagtatgcgcagatgctggggatcgacgaaaacacgctcctcgccatgcgccgcggcattaacggttttactgccgattaccagagcatgctgaaagccaccggcctgaacgccgaccgcgcggcgcagcagtccaataaattcatgacctccatgcgcagcctgaccgcgttgcttggcatggcaaaagacaaaatcggctcagatctggccggcggcctgagtggctcactggatacgctgcgccggcgcatcatggacaatttcccgaagatagaggggttcatcaccaaaaccgttcgaggtgttctctggttagccgaggttttcgggcggatgctttaccgtggctatcaggctatcgatcaggtgatcatttggtggaaaagcctcgataccgaatcgcgcaaactgatcgggattttcggcgcgttgctggttgcctggcggctgctgaatagcgctttcctgatgtcgccgatagggatgatcactgcacttatcgtggggatcggcctactgtgggacgattaccgcacctggaaagaaggcggcaaaagtctcatcgattgggcgaagtgggaaccggctatcacccaggccaagaacgcgatgatttggctgcgtgacaagatgctcgaactgagagacgccgtcggcggctggaaaactgcgctggaaattttggccggtttcgtggctgtgacctgggcggcgaaaatggtcagtgcgatcggctccgtgactaaaagcgtcggtggcctgtcaaaagcgatgggcggcctgggcaaagtcggcgtgatcggcggcttgcttgcggtcgaagaggctgtcgttaaaccgctcgaggggaaatactcctggctgaccaacaaccccgtcgccaatttcctgaaccagctcccgggcagtgacacggtcgacgaatgggggcgcaaactgcttccgtggcgccgcggtgaatctacgcaatatggccagtcggtgcgccggccgcaggcgacaaaagcaggggcggcgctgttgggctggctgcagcccaaactgacgcagcttgaggcaatgtacaacctgccggcgggcctgctgcgcagcgttgcgctaaccgaatctggcggcaatcagtttgctgtttccggtgccggcgcgaaaggcttgttccagttcatgccaggcaccgcccgggacatggggctacgcggcgacgacgtcttcgacccatccaaatcagcggcggccgctgctcgctatctgggtatgctgctgcgcatgaatggcggtgatctggaaaaaacgctggcgtcctataactgggggatcggcaacgttcagaagcacggcatggggctgatgccggcggagacgcgcaactacataccgagagtgctcagcaacatgccaggcgccggcgggaatagcctgaatcagcagacggtgatcaatatccacggcgttaacgatcctgcccgcgcagggatggaagtcgccgatcgtcaaactggcgtgaactcccgcctgacccagcaactctatgcgaggccgcaataatggatattctctccgtcctgttttcgcagcagacccggaagatcggcggcatcatcccgagcgtggcaatctcggaaaaacacagcgacacgctggagatcaccgagcatccgatcgaagacggcgcaccggtcagcgaccacgcctacaagcggccgccggaggtgacgatggagctgggtttcgccggcggcggctcgctgctggatggcgtcgacacaacccagtttatcgacatcaacagcggccggacgctcagcagcggcccgcgggaagtttataagcagttgctcgcgctgcaggaaagccgcttgccgttcgacgtcaccaccggcaagcggcagtaccagaacatgctgatccgctcactggatgtcacgaccgatcgcaccagcgaaaacgtgctgatgtgtgtcctgacgctgcgcaacgtcatcatttcccgcacgcagagcgtttcggttgcggacaaagccaacatggccgacggcgtcagcacgtcggcggtgcagaactctggcactaaatcggccaagccggtcaacgaaagtttgctctcccaggcgcagcgcggcgcgctgggagtgctgggaggtttcgggtgaacattcaggaaattccgctgacgccggacaatcagcaattcgggatcgctctgggcggccagcagatgactatgcggctgacctggcgcgatgagtccggctggttgctcgacctcatggacagcgccggcggcgcactggtgaatagtgtgccgctggtacctggcgccaacctgctggcgcagcatgcgcacctagggtttaccggtgcgctgatcgtcatggtcgacaacaacgaaccagagctaccgacgaaaaccaacctcgggatcggcagtcatctttattttgtgcaggagtagggcatgagtcagaactggatgcggcattttgagctgcagctgcttgaccagcagggcaacggcatcagcttgtcagattttaaagtcactttccgcattgagtgggccgatacgcggtggccgcgcgtcgccaacgtcaaaatttacaacctgtcgcttgatacccaaaaccggattctgggcagcgagttttcaaaaatccgcatgattgccggctatgacgggatcgccccagatgcagacgccagtcaggtcggcgtagcgcggccggtagacccggcgaaatccggccagcgggacggccagaactttggtctgatttttgagggggatctgcgcttcacgatcaccggcaaagacaacccaaccgattcctgggtgctgattcaggccgtgggcgatcatgaggcgtttctctatgcgacggtgaacactacgctcgccgccggctataccgtggctgacgtgtacaatgccgccctgaaaagcttcaacgcctacggcatcacccaggggatcaccggaacttttcccgatacggtttttcctcgcgggctggcgctgttccaatccgcgcgcgatgtcatggactccgttgccggcatgtgtaaagcaacctggcagctgattgacggcaagctgcagatggtcaacgagaacaaatacattcacgaggctatcgtgctgaacagcgaaacagggctgatcggcatgcctcagcagacgatgggcgccggcgttaacgtgcgctgcctcatcaacccgaatcttcgcattaatggcctgatccagctcgatcaggcatcagtttaccgcgcagcactatccgacagtgagattgcccaatccggcggccgcatcagcgaaaccgaccagaacggaaatcgagttgtcgccggttccctgcagcagcccgccagcattgcgacggacggcgtgtatatcgtgaaagcgatcgactatactggcgacacacggggccaggcgtggtacatggatctgatgtgcttcgcgcgcggctcggcagatttgcaatcgagctctactttgctaaaaggacagtagaaaaaaccgatgaaaaaatacctgatgttgttagtcttcggctccttatatgcatcatccggttttgctgatgtacgctgtggtgattacactctaacggccagcaatgatggattcatgcacatcaacggtgtcagaccggaaacccagaaattcaccttccttgggcaaaaagaagactatgacaacgtcaagtacgaatggcgtgttgcaacgaaccagccgggaaaatggttaggtatggagtacgtgaagcggggcggcacgaagcgttttcttaacgttcagctgctccaggccagcatggatgcgccgcgtcagtatgcgacttatgattgcgtgaaggtgaagtagaagtagaagaacatgagaatctctggttgacgatgcgtctctacatgataaattactccgctcgctcaataaattctcacacaacatgtgaagttatagttaacttttgtgatggtttagcataggtgctcatggcggatggagttcattggttttcatggaacagatggtgctaacgaattctctattttgaataggaatttcaacgttagcgcaaaatgcgatgagtggctgggtactggagcctacttttttttggatggagtgggtaagcctgaagaacatgctgaggcttgggcaaaacttcaagcctatgatagtagcattcggggaaatcgatattcacggtttgtcgttattggtgctaaaatcaccgtaacaaatgtgctgcgcatggatactgaagaaggtcttgaagccttcaacgtatacagatcgtacataaaaactagaatggaagcagagcgccaaagtccatcgagaagccttatagtcaacgattgtattgtttttaatcacattcttgatgaaaccgagtttgaagcagtgataaactgtgaatatatcaagctggatgtatggtcaagagtcatgggctacggttctagaatacctaactgcagagtgatgagtgttaagaaaccaacagtgtctattgatgtcaatggattacatgtagcgaaaaggggtaaggtatgaagactcaaatgcaaattgtccaagaagccattgcacgcttggaactcatgagccgagaccaatttcgtgcctctttggtagcggctggcgctgtagaagctatggatgtacggatgcatttcaacgctagcatgtcgggaactgacagaactgagcaaactcagccaaaagactcagagtacagcttgagctttaaacagcgcggccagcatcgcgaactgtctcttgttttttaaggataaaaaatggattttcgcttggttagaatgctggttttaaatttaagcttttctgaagagaaggaaggcgatgaaaaggcggatagcagccttaatattgaagccgcaatgactttgagtgctgaggatagccgccttgctcgcatgacgacagacattactctgaactcgccagggcgttatagttttgaggcaaaaatagccttctttttcaagtttaatgatgatgttacatctgaacaggctgaggaaaaactgagaaaagcagaaactgaaaagttacttttcccatatatccagagttacttaacgaactttattatgtctgctggctacccgcgcccaggtatacctctagtcttgatgtaactatttacaactattaaaaaaacccgcttcggcgggtttttttatgggaaaaattcatgcccgtacccctcacatctcaaatcggtgataagcagcagaccgaccaggcgctgatcgacgccatcaacgcgggaatgcgcgtatcgatccccggcatcattcaatcctttgacccgggagatgagacaagagcgcctacatgcgtcgtgttgccatcagtgaagggttacgagccggacagtaccggcggcggtaattcctccagcctgccgctgctggtggatatcccagtcattttcccgcgtggcggcggcgtcacgctgacgtttccggttaaggcgggggatgagtgcctgcttgtgtttgccgaccgctgtatcgatttctggtggcagaacggcggggttcaggaaccggtagacggccgcatgcacgatctgtccgacgccttcgctatcgtcggcctacagtcttgtgccagaaaaatagcgaacatcagcaccagcgccgcgcagctgcgcaccgacgacggcgccgcatttatcgaactcgaccccagcagccacgcggtgaccgttaccacgccgggtaagctgaccgccagcgcgcagggcggcacggagatcaactcccccgaaattgtgctcaacggaaacgtgactatcaacggcaacctgtcgcagggcatgggtgacggtggcggcacggcgacaatgctggggccggtcaacgtgacgaacgatgtcaatgccgggggcatcagcctgcagacgcacaagcacggtggtgtagaaactggcggcggccagacgggaggcccgcagtgagataccgtaaagaagacaagaacggcgattacagtttcgggcgcggcgagggtgatttcttcattaacacgcccgaggctgtgggcatggctgttatcagccgcctgcagctgcgaaagggtgaatggttcctcgataccaccgccggcaccgactggacgcagatactcggcaaatacacgtcgggcctctatgacatcgtgatccgcgagcgcatcctcggcacgccgaacgtgaccgagatcgtcgagtaccagagccagcgcgatgttgatacgcgcgacctcctgatcaccgccacgttaaacaccgccttcggtcaaacctcggtaacaacctatgtatgaagacattatcgattcgatgctgccaaaaataacggcggcagggatgagcgcgcctgaattccagaccatcctcaccgggtggcagacgatttttcgcggcatctatggcgatgacatctacatcgagccagacagcaaagacggcgtgctgttgtcgctgatcgcatacgcgatgcacggcggcaacaatgcggcgatcgccacctggaatgcgtttagcccggcgaccggcacaggagcagggttggcgagtaacgtaaaaatcaatggcatcagccgaaaggcgccgtcaaattccacggttgacgtgaagctgatcggtcaggttggcatagtcatcagaaatgcctcagtacgcgacagcgccgggaacctctgggatttgccagcagaggtggaactcgacattcacggccaggcggtggtaacggcgacggcgcagaaggcaggtgccatcaccgcgctgcctggcgatgtttcgcaaatcgctacaccgacgcgcggctggcaatccgtcacgaatcctgaagcggccaccgccggcaaaccggtggaaactgatgccgagctgcgccagcggcaggcgctcagcgtcgcgctaccgtcacgaactgtcatggaggggctgataggtgccattgccaatatcaccggcgtgacgcgctataagggctacgacaacgatacttcggaaaccgacatcaacggcgtgccggcgcatgcggtttcgatggtggtagacggcggcgatgcagaagagatcgccaggatcatcgcgataaaaaaatcacctggcgcgccgacgttcggcactacgacggtgatcgtcaaagatgcctatggcacagacaagccgatccattttttccggccgaccaaagttccgatttacgccgctatcaaaattaaggtgcttcctggctacaccagcgacatcggcgaagacataaaaaaagccgtgtctgactacatcaacacgctttacatcggcgatacggtctatttttcgcggctctacgttcccgccacgctgggcaacgctgacagcggtaaaacctatgacctgatgacggtgagcattggcaaagatgcagtcacgatgagcgaggccaacattccgatcctgtttaacgagtctgcgacctgttcgccggagaatatcgcaattatcacggtggcatgatgaccaacaaatacaccgcattaatacccgcttatcactgccaattccccaactacttcgccaccgtcaatgcggttactgaggcgttcgtgcgccagcaggacagcacgcgcggtatcgtgccggcctttgacctcgacaacgccatcggcgctcagctcgatgttatcggtctgtgggttggacgcgggcgtcgcatacgcgcgccggcagtgaaccattatttttcgttcgatgatccggagcttggtttcgacctggggacatggaaggggcgctacgaatccggtgatgagtatatcgatctggatgacgacacctatcgaacggtgctgcgtgcaaaaatcggcgccaatagctgggacggcactgtagaaacgctgcccgctgttctggcggccatttacccggaaggcggcatctctatcactttttctgacaacctcgacatgagcatgacgatcactgctcgcggtgcggtaatacctgcaatcactaaagaaattattcggcaaggatacctatcgattaaaccgatggggatcaccgtcaattatgaagttgcggagggataaatggcgaagaatgaatttaaaccgtttgctatcggtgaatatgcaaacgttttgacccaagaagaatatgaagctcttccagctgttggagctgggtatacggcaggtatagcgaaaagcgaacagcttaataaaacatggcgacaagcctcagtaatggcgtctgttttaggtgatttcatcgcagagcaatcaggtgatgatgttctcgatgacggaaaattagatgaattaaaggcctctcttgaaattgctttgtttaattactcttctgaaaaattagatctcaggtatgtaaaaaaatctggtgatactatgcagggtgggctgcacattaacagtgaccttgaggtggatcaagatgcacttattcttggtgaggcaaaggccgggtcattaaattcaatttcagacaccactattgggcgagccctgtatgtgaatggtcaggatttcattatgaaaagaggcctgcaagacccaataaataatgaaaggcaaacgaacggcattcgcttaatgggggctggtgacttatttgttgatttataccagcatgaacgtattggaatgcaccacttctttggtgttcatgtgtccaatggtggcgctgatggctggttcgagtttagaaatgatggctccgcgctggcaaatggtggtttttttgagggcgagcagcgcgtttatagcccaaacaacaagccggatgagttgcatgttgatggggatagttggtggtctcgagattcttcggggaaaatcacgcagggcggaatagtaaaccgttcggcaaactcaaatcccgtatctttcccaatttcattcccaaataaattattaggcatcaagttgacattaagacaagttagcgagactggcggttctactgacaatatcattgcccaaggtgccaataattcagggttctttgtatggatgaacgctaacgaattatcagcttattgggaagcaacagggtattaactgtttcaacaattaaactgagaataaatttatgtcgaataacggtttgccagtcactgacgtggtaggggtttctgttaccctcggtcagcgccgaactgccggcgcatcagcaggtgatgcatacgcccaggcagcccagggcagtgcaatatcagcggcaaattctgcagcgaaagcttcgcaagctgagcaaggagctgttgccgcaacgaatggaattaatgaaaaagcggaacaagttgctattgacgctgatcgcgcggaaaccgcagctgaaaacgcccagaacatcgcagacgccaacacctactacacatcaccaacagaccctgacggcacgattgcgggtattgccggcactcctgacggaaaaatattccgcgtcgcaattaacgacgactcaggtgtaacggtaatttttaaatactataaaaacgccgctggaacggctgaatatatcaatgctgaggctagtgcccgtcttatatatcagatggagcaggcggtaaattacatgaagctgatttcgccacaagggcaatcaaacacccttagtggttatcaggtgatggttactgacttcacagggaaaaacggcctgtttggcgttaatgataatggtgggtttgaggttttaggcattgatggggatttgcaggactatttgactaatttagtttctgcggcgttctccagcaaaatatcaggctatcaagttgttatttttgctcaggatttgaagtcggttatattcgccattgatgatgatggtggactttggcttcctggtcttgatgagcctgtacaagatgctatcggcgcaagcggtccctcatttgtgcgtccatacaatgggtggaatgcgctgtttgcaaacaaggattcacaaataccgctatggagtcgtcaacctgtcatttctgtcacgccagtaactaaaaatggcgtgtcatttgtatatgaggaaaatggcgtactgaaatctggactgatgccaacaaaatggccggcaaatgaggtgtacgggccgccatgtgaattgtcacccatcgcccgtgaagttcatgcatatttggggcgaggtcagtcccttcgtgttggcggtggaaatcggatatcgacgctgaaccctttatttaaagggcgcctattcatgttctctggtgccggccaggacaggggtgcaggagtaccaacggatggcccagtatcagatgaggcgttagctggatttactgatgcccaaccattggcatcacgccagagctgccagacgcctgctctttaccgcattgctaaacgacatattgatcgtggagtagctcctgtcgatatcccgtcaatgtttactcgcatggacgcgcgttctggcactggttacgccggacttaagagagggacgcagccatacatcgatgggcttacgtcttgccaggcctttgcggatcgtgtccgcgcggtcggaaaaatccctgtcatcaaatgcatcggcataacacacggcgaagatgatgcgggaagcggcacagtgacgcaatttggcgattacaaagccatgttggaggaatgggttaatgactcaaatgcggacatgatgcctattaccgggcagacaacgcctattatatgggatgttgatcaaatgggcgggtggattcggacggtgtgggagccaactgggcgaacggtatacggtgatattgtgtcgatcgatcagtgggagtttatgctctctcgttccgacgtgattatgagctgcccgaaattcccgcttaaccgaatgtttccgagtgatttccagcatctgacaaacgtcggctatgctgtgctgggagaatatcaagggcaggctgaggatttcacgatctacgacccggcaggttcccgctggaagcccgttcagcctgagacaattaccaaagttaacgaaaacacgttcgatattggattccattcgccattcggtggcgcgctgcgcttcaacacgtcgatcggtagtgctcctaatagcggaatcgatctgggcttggcatctacaaccgtcacttcagtaacacagactgccgataagacattccgtgtcgttactggtgcggcacctgctgcaaatgactggttccgatttggctttaatgcaaatgaccccagaacgatcaacggcgtcactttcattcatccgctggtaaacatcagcgatgactctcaaatctcaagtgaatacgtatcaggcctgaagctggtaaattggtgcgtaggctctcgaatttttatccccgcataaggattgaacgaaccatgcctggattaccacttaacacaatgaagccatattccggaacgcgtaaagcgattgacctttcaaacgcgtatttagatcctgataaattatttactgctcataaaaatagagtcgttgcggacggcggtacgattttgaatgaggcatcatgcaagaacgaaattgcatttattatcaacctgggactgtgggataatatggcctctgttgcatcgccagaatggggtattaagcaagacggctctggtaatattttgaaaatgtatgggctgggtaacaccccggattatacagcaacgcaatttggaacagcactgcacccagtcacgctggacacaacgcgagaaattccgttagcgattatcaaaatggatggcggaggcagtcagctggtgagcggagcagttgttcttcagggacatgcatcgttgccgtatgccgtttctgttcgtggcatagattacgatattactgataaccaagggatcgcggcgcggtttaatggcccgtcgtggccacacttttactactggtgcataaacaggcaagcgcagaaatttaaatggttctactcatgtgatcaatttaatccaccaactggcgccggcggcgccagcgctagcaaggtatgggacggaaccattggtaggtctgctgcgttggttagccccattgagggcaagttacgggcttacgacagcggggcgttctcatcagagtcgtcaagcctaccaccgccaaatatctcggggataacaggaactatcacgttgggcacgcgctatgctaatgagcaaactatcgctggtgcggcgtatggcgggattggtcgtgtgcgggtgttctcaatctgcaacgacgctgcagcctcacaaatctcagcacgcgcgtagtgtaatatctgccgggagggaacccggcgattcagcaaaactatctttctttatcgatcaggcatctgccattttcgaactgaatctatcttcacaccggttttttcttacgcctatactgtgcgggtatacagtattttgttgtgaggtaaacaccatgggaatgccaaaatttgctagtccggcagcagactacgttgagcgccgcttgagccttgacgagatctgcatttcaaagccgagcgctacttatctgctccgcgccgccggccaggcgatggcggtcggtatccacgctgacgcgttgcttgttgtcgattcgtcggcgacgccggtacacggcagcattatcgtagccgccgaggagggcgtgcacgtgctgcgccgcctgcgcctctatccgtatcgcgctctcgagtttctcgatggttccgggcgggagactgaactcggtaacgaggattcggaagaaggggttcaggttttcggggtggtgatgtactgcgtgaatgatatgcggtcgtgcgagtgggatgatctgccggttatttgatgaccggtcatgttttctggtcttatgatgatttgggagaggtgtgcaggattttgcggtataaaaccgctcgaacttttcccgaatcgaatcgagattattgataactatttgaatgcaaaagacggttaacgaaggtgtttttgatggctttataatccatgcctgagttatctatatgaaaatatttaatttatttgttttcgttcgattaaaggaatcgtattcggtcttttttgtgtgattgatttataagaaaatcccacttaagacgccaataaaattctggtttctctttccagtcgtaacacctcagcccgatctccggctctacacaccacccgcacctatcgctaatttagccgcaccaaaagtcattacgtcatttatggcgctgataagctccgttcattgttcccattatcggtttaacgagagtggcattatgcagaatatcaaggcattaggcgttgtaaaaggaaacctgcgttgaacgatcggctgaatcagttgaagagggcgctacccggctatctcaatgcgtggcgtgagggggccttaccctctgactgggggcaggtggctaatcctgaagtggttgccgccctgttggcggagtgggaggcgctaagcgagttggcgtctcagttcgaaaccgccactgaagccccctccgaaccggccgccttttggcaggcgcgcgccgagctgatggcgcagcgcaatcgtgagcttatggcccaactggcgacgccagtccgtttgcccggcgcacgggtggccttttttggctatgtgaaaacggccgtgatggacgccaggcaggttaaggcggcgattcgcgatgccggttttatcgttgcgggcggcgcccccaacgagaacacagcttaacgcggtttcttctcaaatttctcggcaaaaaagaaccgcagcaatttatgggtccacagcaggatggcgccaaccaccaccagcgagacgacgaaatgcgacagatttttaggcgcggcgtagccgtgggtaaaggagacccccgcgccgctgagcagcagggtggcgatccagaagccgagcagcaggcataaggtacgaaacagtttaaacatggttatcaccaaaaatacggaaagcgccgaccgaacggagaggctcagccggagctttgattaattaaaaccgcttagcgcgaacaggtattgccgcctttactgctattgttattgcagctgctgccgctgtttttgttgccgcctttccccatgccgacgttgccgccgcccttgctgccctccttgaagcagccgccgttgagcgcgcccactgccaggccgccaaggccgcccagagagccggtgatcacgccgttaacgcaatccggcgaggtgtgcttgccgtagaatccctgattggatgacccgcccccgttcttgttgccgccgttgttgttgacgcggccattgctgccgcggttgtcggcaaagttaccggcaccggcgatcaggtgaaagtgtttggcatcgatctcttgcataaaattccctctttatcgattcagttaaattcagtaaagcttgcgcaagccagctgtttttaacagaaaaaatagcgggggtaattaccggttcggataagaacagggggtttattttgcgatattttccagactgatagagcacagaggaatgatatttggggcgtgtggaaccgtagcgctatctgttctcttgggtcggttaatttgttagcatggcgcccctggatgactattggtgcagtacattgaaaattaaagcgttgttatttgttgcgttggccgcgctggccggctgcagccaggagggaacctcgatgaatcagcccgcaaacgagaaaggcggccaaacggaagtgttgctggtcaacagcgcgctggtggactgcgtgggcgtcggcccgatgaagtgcatgcaggtgcgccgctccgcgcagcagccgtgggagttgttctataccggcatcgagggcttcaccttcgaacctggctatcagtatcgattgaaagtgcgcgtcaccccggttgagaacgtaccggccgatgcctcatcgctgcgttacacgctgattgagcagctggaaaagaacaaggcgtaatgattatcaggccgggcgaagtgagcccgtcctgctgttttatagcgtcaaccccatctccgccgcgacctgctccagctggtagcgtgatgtgcgcgtgagtgaaggctccttatcgacatagtagatgtaagcgataacgccaatcgacagcgcccaggcgcggccgcgccgccaggtctcatcgtccactttcaccgcctggcggaaatgttcgcgggcttccgctcccatcaggttccaggcaactatcatatcgaccgcaggatcgccgatggcgataccgccccagtcgatcaccgccgccaactcaccgttgtcgatcagcacattgccgggttgaatgtccgtatgcagccagcatgtgccgctggtgttttcactcacctggctcacgctgtcccatgcttgcagtagggcggcagcgtcgaggtgaggggcgcactgggcaatagattcgcgagtgagggcatctctggcgctgaccgggccgccgcgataagcgctgatcgcgtggcctgcggttgggatggcgtggagtgcgcgcacgaactcacccaattgcgtcgccagcagcgggctgcactcgccgcaggtgggcgtgcggccggtgatccaacggccgatgctccaagcgaaaggatagtggacgttcggcttaccctgggccaagggcgcggaaatcgtcactggcagatgaggtgccagcaacgcggggtagcggttctcgcgcgccagcgcttcggccgccgaggcagtacgcggcagacgaatcaacagctcgtcgcctagccgcagcatcacgttgtcggtaccgccggtggtgacgagttcgatgggcaacgccgcccaggccgggaattgttcggcgagcatgactcggacatgggggagggaaatctcggcctcatcggcatgtattttgggaatggcattcacccggtacggctccttcactggcgcgggggggggcggtcccgactggtctgttcactgcgcttgttttcgcactttcttaagtatatcgagaaaatcaggtatattgtccttcggtttttagctaccaagaaaaaattactatgattatcaaacctaaaattcgtggttttatctgcaccaccgctcacccggcaggctgtgaagccaacgtccgtgagcaaatcgcctacgttaagtcacgcggcgaactgaaaaacgggcctaaaaaggtgctggtcattggtgcatccaccggttacggtctggcctcgcgcatcaatgccgctttcggcagcggtgcggccaccatcggcgtatttttcgagaagcctggcagcgaaggcaaaaccggttccgccggttggtacaactccgccggtttcgacaaggcagctaaagaagaaggcctgtacgcgaaaagcatcaacggcgacgcattctccaacgagtgccgtcagaccgtgatcgatctgatcaaaaaagacctgggtcaggttgacctggtggtttactcgctggcttcgccggtgcgtaagatgccggaaaccggcgaagtggtgcgttccgcactgaagccgatcggcgagccatacaaatccgtcgcgctggacaccaacaaagacgtgctggttgaagccgtggtcgagccggccaatgagcaagaaatcgccgacaccgtgaaggtgatgggcggccaggactggcagctgtggatggacgcgctggacgaagcgggcgtgctggcggataacgcgcagtcggtcgcttactcctacatcggtaccgatctgacctggccaatttactggcacggtacgctgggcaaggcgaaagaagatctggatcgcgcggcgcacgccatcaaccagaagctgcaggccaaaggcggcgcggcttacgttgcggtgctcaagtcggtagtgactcaggcttcctccgccattccggtgatgccgctgtatatctccatcgtgttcaaaatcatgaaggagcagggcattcacgaaggctgcatcgagcagatccagcgtctgttcgccaccaagctgtacagcggtgcggcgccggacaccgacgagaagcaccgtctgcgtctggatgactgggaactgcgcgacgaagtgcaggaaacctgtcgtgaaatctggcagcagttgaacgacaacaacatcaacgaactgaccgattaccagggctacaaggcggaattcctgcgcctgttcggcttcggtctgcagggcgttgactacgacgccgatctgagcggcgaagccaattttgatgtgatcgagctggtctaagcgcgttgagctgtcaaacaaggtcgggttagcccggccttttttattgcctgcgaattatcgggtggctaagcgaaaatgtttatttcgggttaacagaggaaccgggtggttaacattggcagtcggatggtgaaataacggcggttattaaactaaagaaagtcattttttatttacccttgccgccggctgcgggtattttatttcctttaaggagaaaactatgacatggcgttattgtgccacggtatcgttgtttttgttgagcggctgcagcgcgatccagccaacgtcgacgtccccggactggtctcagcctcagccggccacgcgggaacagcggcaacgcatcatggcgggtgagtctgcctcgtcggtattgcatgaaggtaatatcggtattggcggcacgttagatgggtcgaaaatattcgatcgttaaaccgctaaatatattcagccaaattaatgcgcgcattctgccgatattgtcggagggtttacctttcctgcgttattctgccgtggcttgaccattcattgcgttagcagacaattcgttttccttatagggaaccgccggtttatttcggcgtaatcaaaggagttgcccatgacgaagaacatggccgcgatctttctcttgctgttgccgccgctaagccaaagcgccggcgcagcgcgctacgacaggccgtgcgaaggagtgtcgccggtgctgtttcaaaagcgcctgaaagcgctggcgcaggatctgcggcaggaaatgagcgaggaagcgccgccgacagagcgtgatgcggaagagctggcgcggttggcggagtgcgctatcgagcccggcaaagcgcccgtcaccggcgggcagcgcgtctcccgttcagaggaaaagccgacggcatcgccgaacggttgctgagccggcgtgtgcgcagagtcaaagtcaagcgatgtaatgtaaaaggagtcattgatgaaaaggatcgtgttggccggcgtggccctgtgttgttccagcttcgcgcaggcgcgggtggatctggaataccatgcggcggcgccgaaggacagtaaggtcaccgaggagtaccagaaaaagcgcgacgcattgcgccacaaggtgtggaatgtcgataatctgacgctggccaacgagcaggcgattgcacgcgaacaacagcgcgaagccgctgagaccgccgagcggcagcagcggaacctggaacagcagcagaaaaagcagcgctgcctgcacagacactcgaaagatcctcatcccgaggcgaagtgttacatgcacaacttctaacctttaacgtccgggcgctttctgcgcccgacgtcgtttaggccgggcggcaatgctctttcagcatggcgatcgcgtccggtttcagctgatacagatagaccggccggccggtggcgccgtacagaatacgggtgccgaggatgccgctttccgccagatagatgaggtacttgcggcaggacacccgcgaaatgccaatggcgttggccagattgtcggtagagaattcgctgtcgtgctgctgttcgatccactcgcacaccgtgctcagggtgatgctggtcaggcccttcggcagctttttgctctcctggccgccgggctggcggcgcaacaggctgtcgacgtcggcctgcgaaaactcgcgttgcgccaagagctgtgactgttgccggtagtggctcagcgcctccttgaagcggctgaactggaacggcttgatcagataatccaccacgccgtagtgcagcgctttttgcaccgtgttcacgtcgctggcggaggagatgatgatcacatcggtcttttcgccgagttcgcgcaggccgggcagcagatccagcccgttctcctgctgcatgtaaatatccagcaacaccagatcgatgctgacgctggcgtcggccagcagggcacgcgcctggctcagggtcgcgaccgtcgcctggcagtgaaaaccgccgacctggctcaggtagtatttattcagctccgccaccatcgggtcgtcgtcgacaatcagtacgttaatcatgggctctgctcttggcctgatagggaaggtgcacgaaaaattgggtcagctcgcccggttcggattcgaaatcgatgctgccgcccagtttctccagatggctgcggatcagcgccaggccgatgccgcgtcccgttcccttggtggaaaatccgtgttcgaagatgcgcgcgccgatcgccggatcgatgccggggccgtcgtcgctgacgatacagtgtaattgatcgtcgtgatgatggaagctcaggccgatctcgtggccctcaacgccgtcgatggcgtcgatggcgttttcgatcaggttgccgagcacgctgatcagcacgtgggtggtttccgcatcgtcggtttccggcagcaggctgttttcctcgatggtcagttcgatgccggcctcgtgggcgcggctgatcttgccgatgaagaagcccgccacctccggcgaatggatcttgcgcagcagcgcgccgatctcttcctggtagttgctggcggtgttgatgatgtagttttccaactgctgataggccttcatatgcagcatgccgagtatcacatgcagcttgttcataaattcgtgcgactgcacccgcagggcgtcggcgtagtgcgccatgccgctcagccgctgcagcaggcggctgatctcggtcttgtcgcggaaggtggcgatggcgccggtcacttggccgttgacgatcaccggcacggtattggtcagcagttcgctgccgttgaagctgatctgccgatcgcgcagcggttcgccgctggccagcacctccgccagatgcagctgcgccggccaatgtttgctggcggcttccagcagcaggttttccaccggcccgctctggcgcagcaggcgcttggcttcgtcattgacgatggtgatgcgggattcattatcgaccgcgatcacgccttctttaatcgattgcagcatggcgttgcgctgttcgaacaggttggagatttcgtaaggctcgaaacccagcatgatgcgtttgagcgcagagaccaggaaaaaggtgcccaggctgccgaccagggcggcgaaggcgatggtccaatagatgatccatcggctttccgccaccacccgctgcacggtgtccagcgcgatgccgagcgccaccacgccgatttgttttttctgatcgtcatacaccggcacgaacacccgcagcgccggagccagcgtgccgcggttgatggcgctgttgacgttgccttgcagcgcgggcgccaaatcgtcgccgataaaatgcttgccgatcagccagggtttagggtgcgaatagcggatgccctgcatatccaccaccaccacgaacagcagctcgttttgatggcgcacctgctcggcgaagcgctgaatggcgccgctgtgatcgcgccgctgcaggccgtcgatcacggtgttggagagcgccagcgtgttggcgacggcgatggctttttgctgcagctgatcttgcccctcgcggctcatctgcacgaaaaacagcgcgaacaccaccagcagcaccgaagcgatgatggcggacaccatcagcgtgatggaggtgctcagcttgagcggcacccgttgttttggcatggcggttctccgaatggcgatatcacggcgtattctagcgaggaatgcggcaagctgcagttaccggcagcaggttatagcacgctgccggggtgcggaggggttattttagttacaaaagcgggttactgctggtggtagatctccagcgcctgttggccgctggcgccctgatggatgatcgccatcagggcgcgcaccacctgcgacgggttgctgtgttgatagacgttgcggccatagaccatgccggaggcgccctgggccatcagcgcggcggatttctccagcaccgggcccagctctcccttgccgccgccgcgcaccagcgtcgggcagcgcgccgcttccaccacgcggtgaaaatcttccacccgatcggtcggatcggccttgatgatgtcggcgcccagctcgcgcgccagccgcaccagcggcacgattttctccacgtcacccagcgatccgtaggcggcgccctggccggccggggccatcaccagcggttcgatcatcagcggcatggcgtagcgatcgcaggcgtggcgcaggcggccgatgttttctacgcactggcggaaaatgccgggttcatccgggatcatatagaggttgaccaccaccgcggcggcgtccatttgcagcgcggccaggatcggcgcttccgggttgtgcagcaccgcccacatttcgcggtggcgtgcggcgttataggcgttgccgacgtcggtgcgcatcaccagcgccggtttttcgcgctgcggcgctcgctgcagcagatccgcctgcccgtagttgacctgaatcgcgtcggggcgcgcggcgatcaggttgcccatcacccgttcgatatcttccagcccgattaaaaaatccggttcgttggcgatgccgtgatcgatcgccacatccaggcacttgccgttgttgaacaggcggttcatccgcaccttactgctgagctgcatgtcaggtcctcctgagatagggatatgtccattattgccgagtaaggatggtcgggaaacgcagaaaccgcaaactgcgcgcccgctcgcagtttttgccggcgcacgaaaggggaacgctcgcgggcggctttcatttcatttgttagatccgtgtcatgtttttgttaataagccattccaaaacgcatgtttcgcttgtttgggttaaaaagtttcaatagtctaaattatgaaataaacatttaaaaaagcggcgaagacgcggcttgctccaccaggagtttatttcaattgattgtttttaatctattttgagatatcgatcaccattttgttcacggccttaatacggcgataacgcggtaatttcgccgtatcaaagggataacaccgaccgtattgttgtttgaatgtaaaaaatatttttcattagctgtcaaccaacagacctcttcattctaacgattaaagggtaacgaacatgaagctgaagaaattgatcgccgcctcggtactgatgtgcatgctgccggccagcgtgttggcgaaagacatcaagatcggcgtttccatggcttacttcgatgacaacttcctcaccattctgcgccagtcgatgcaaagcaaaatgaaggccgacggcaacgtcagcggccagttcgaagacgccaagggcgacatcgcgcagcaaattcaacaaatcgaaaacttcgtcagccagggcgtcgacgccatcatcctcaacccggtggatacccagggcgtcaagccgatgatcaaactggccgagaacgccaagatcccgctggtgttcgtcaaccgcaagccggaagtgacgctcccggccggcatggcctacgtcggctccgattccaagctggccggcaaactgcagatggaagcgttggccaagctgatgaacggcaagggcaacgtgatgatcctgatgggggaactgtcgaatgaatcgacccgcgaccgcacccgcggcgtggaagaggtggcggccaactatcccggcatcaagattgtcgataagcaaaccgccaagtggacgcgtaaagatgcggtggatatcaccactgactgggtgctgaccggccagcagatcgacgccatcgcctccaacaatgacgaaatggccatcggcgccatcctggcgctcaagcaggctaaaaagtccggcgtgcgggtggccggcgtggatggcacgcccgatgcgctggaattcatcagaaaaggcgatctggcgctgagcgtgttccaggacgccaaaggccagggcgagggtgcggtgcagaccgccgttcaactggtgaaaggcgagaaagtggagagcaacgtgctgatcccttaccagctgatcacccaggccaattaccagcaattcgccgataaaaacaagaaataagccttgaagcccgccgcgggcgccggtgtggggcgagcgcggcggaaaacgtgggtcagtgcggaggtaagcggtatgtacccttatgttcttgaggccgaaggcatcagcaagcagttccccggcgtcaaagcgctggataaggtctcgattaaaatcaaacccggcagcgtgcacgcgctgatgggggaaaacggcgcaggcaaatcgacgctgatgaaatgcctgatcggcatctaccacccggatgaaggctcgataaaaatcaaaggccggccggtcaccttcagcgacacgctgcaggcgctgcattcgggcatttccatgatccaccaggagctgaacctggtgccttatatgacggtagcggaaaacatctggctggggcgcgagccggcgcggttggggttcgtcaaccacgagcagctgaacgagaacacccgcgagctgctggcgcggctgaacatcaaactgcagccggacacgctggtgggcgaactgagcatcgccaaccagcagatggtggagatcgccaaggcggtgtcctacaacgccgacgtattgatcatggacgaaccgacctcggcgctgaccgaaggtgaagtggtgcacctgttcgccatcatccgcgagctgcgcgagcagggcaaaggcatcatctatatcagccacaagatggacgagatcttcgccatcaccgacgaagtgagcattttccgcgacggcactttcatcgcctgcgacaagaccgaaaatctgaccaaacagtcgctgatcaccatgatggtggggcgtgaactgacgcagatgttccccaaattcaacaacaatatcggcgaggaagtgctgcgggtggcggggctgcgccgcagcggctggttccacgacgtgtcgttcagcgtcaaacgcggcgagatcctcggcgtcgccgggctggtgggcgccgggcgcagcgaagtgatggaaagcctgttcggcatgcacccggcggaaggcggcgagatctttatcgagggccaggcggtgaaggtcgattccccggcgaaggcgatcgagagcgggttggcgttcctcaccgaagaccgcaaaaaatccggcctgtttttggtgctgtcggtggtcgagaacatgagcatcgtcaacctgtcggaatacatcggcaagaacggtttcgtcagccacgtgcagatggccaaagactgcatggatcagatcaaaaagctcaacatcaaaacgccgaccatggatcagatcatcaataacctcagcggcggcaaccaacagaaggtgctgattgcgcgctggctgctggcgcagccgaaaatcctgatcctcgacgaaccgacgcgcggcatcgacgtgggagccaaagcggaaatctaccgcctgatcagcgagctggccaaccgcggcgtcgccatcattctggtctcctccgagctgccggagatcctcggcatgagcgaccgggtgatggtgatgcacggcggccgcatcaccggcattttggacaaagacgacgcggaccaggaaaagatcctggcgctggcctcagaataacgaagggtgaacatcatgagtaacgtaaagattgagaagccgctctccgccgattcaacgagcaagggaacgctgttctccgggctgagcggcaaaatgccgaaggataccggcatcttcatcgtgatgctcggcatcgcgctggtcttcgaaatcctcggctggtacatgcgcgatcagtcgttcctgcttaacccgaaccgcctgctgctgatcgtgctgcaggtggcgatcatcggcatcatcgcggtgggcgtcacccaggtgatcatcaccaccggcatcgatctctcctccggttcgctgattgcgctgactgcggtggtggcggccagcctggcgcagacctcggacagcatttcgccgatgtacccggggctgctcgatctgccggcggcgatcccgatcggcgcggggattggggtgggcattgtctgcggctttatcaacggcttcctgatcacccgcaccggcattccgccgttcatcgccacgctggggatgatggtatcggcgcgcggtctggcgcagtactacaccaagggtaacccggtcagcttcctgtcggacggcttcacgtcaatcggccagggcgcgatgccggtgatcatcttcctggtgattgcggtgatcttccatatcgcgctcaaacacacccgctacggcaaatacatctacgccatcggcggcaacatgacctcggcgcgggtgtccggcatcaacgtcaacaaatatctggtgacggtttacaccatcgccggcgggttggcgggactggcgggcgtggtgctggcggcgcgcgtcagcagcggccagtcgagcatggggatgtcgtacgagctggacgccatcgccgcggcggtgatcggcggcagcagcctgatgggcggcgtcgggcgcatcaccggcacgctgatcggcgcggtgatcctcggccttatcaaaagcggcttcacctttatcggcgtcgattcttacattcaggacatcatcaaaggcgtgattatcgtcgccgccgtgtcgatcgacatgcgtcgcaaccgcaagaaacactgattgccgtgaattgccgccggcgccagggttggccggcggtgtttttttaccggggggcacatcatgaattacctgaaagggctgtggctggcggtggcgctgtgtgcgtccaccccggcatgggcgcaaaccatcggcgtatcgatggcctatttcgaccagaacttcctcaccattatccgccaggcgatcgacaaggaggccaaggcgcgcggtattaccgtgcagttcgaggacgcgcgcggcgacgtcggccgccagaccgaccaggtgcaaagctttatcagcgccggggtggacgcgattatcgtcgatccggtcaactcggccagcacgccggtaatgaccaaaatggtgcaggccgccggcgtgccgctggtgtacgtgaaccgcacgccgggcgacgccaaactgcctcagggcgtggtgttcgtcggctccgacgagcgggagtccggcacgttgcaaatggaagagttggcgcggctggccaactatcagggcaacgtggcggtgatgatcggcaacctgaccgacgccggcgcgctgcagcgcaccaaagacgtggagcaggtggtggccaaatacccgaacatgaaggtggtgcagaagcagagcgccaactattcacgcagtgaaggcatggatctgatgatgaactggctgaccaacggcgaagcgatcgacatcgtcgccgccaacaacgacgagatggcgatcggcgcgatcatggcgctgcagcaggcgggcaaggcggacaagaaagtgctgatcggcggcattgacgccacgccggacggcctcaaggcgctggcctccggcaagatgcaggtcacggtgttccaggacgcgatcggccagggcaaggcgtcggtcgaggtggcgcagcgcatgatcaacggcgaaaagcttgagccgtattactggatcccgttcgagctggtgacgccggccaatcaggagaaatacgcggccaaaccgtgagttcgccgtcggatccgcgttgccggggcgctgcttgcagcgccttttttattgcgccaattgcatgtccgcttgcggccagcgcggcgtcgaaccttgcctcacactgaggatctttaaacagcgtgaggatgagcgatgaacgcattaaacggcaaggtggcggtgatcggcggcgccagttcagggatcggcaaagcggcggcgctgctgttcgcccggcagggggcggcgctggtgttgggcgcccggcgcgcgccgctgttggccgagctggtggaggacattcggcgcgagggcggccgggcattggcggtggcgggtgacgtgcgcgatgaagccttcgccgaacggctgacggcgacggcggtcgacgaattcggcggcctggatatcgccttcaacaacgccggcacgttggggccgctggggccgtcgctggcgctcagcgcgtcagaatggcgcgaggtgctggaaactaacctgtccagcgcctattacggcgccaggcatcaaattcccgccatgctggcgcgcggcgcgggctcggtgatcttcacctccacgttcgtcggccacaccgcggcgtttcccggcacggcggcctatgcggccggcaaatcggggctgatcggcctgacgcaggcgctggcggtggagtttggcgggcgcggcattcgggtgaacgcgctgctgccgggaggcaccgatacggcgatggggcggcagatgagcaataccccggaagccttggcgcaggtggccgacctgcacgcgctgaagcggctggcgatgccggaggagatcgcgcaggcggcgctgtatttggcgtctgacgcttcctcatttgtcaccggcaccgcgatgctggtggacggcggcgtgtccattcagcgcggctgaggttggcatggcccgtggcctggcgccacgggcatacgggagagcgttaccagcctttgacggcgtcgcctttgtaaatttcggcggcgctggccgccacttcgtcggtctgataggccttgaccagatccttcactttctcgctgtctttgttgtcgatgcggctggcgaaaatgttgacgtaaggcgagtttttgtcttcgacaaacagcccgtccttggccggcgacaggccaatctggctggaatagttggtgttgatgatcgccagcgtcacctgttggtcgtccagcgcgcgcggcagctgcggcgcttcaatctcgacgatcttcagctttttcgggttgctgacgatgtccagcgcggtcggcagcaggccgacgccgtctttcagggtaatcagcccctgtttttgcaacagcaacagcgagcggcccaggttggtgggatcgttcggcaccgccacctgcgcgccgtccggcagctggctgagtgcggttatcttcttcgaatagccggcgattgggtagacgaaggtgttgcccaccgccgccagcttgtagccgcgctcctgcatctgcttgtccagatacggtttgtgctggaaggcgttaacgtccagatcgccgttgttcagcgcttcgttcggcagcacgtagtcgttgaaggtcaccacctccacgtccagatcgtatttctgcttggcgaccttttgcaccaccgcccacagcgactgatcgataccggcgctgatgccgaccttgatgtggtgatcgtcctgtgcggttgggccgcaggcggtcagcagcagcgtgccggcggcggccagcgccagggtgaggtttttcagcgtaaatgtcattttcccagggtccttttcaacattgcctgctaattttggctggcagaatagtggcagtgactgtaggtaatcgctgggctaaaacaaaatactgattcactatgactcatagcgattagctatgagcggccgcggcccggtgcggagcggattgttttgacggcgaatcggcgggcttattatgatagccgttggcccgcgagggcagactgggtactgaaacgaaggaaaagacaatgcgattgaacacttggagcaaggcgctgctgccgctggtggtgttggcctgcgtctcggcgactcaggttcgggcggcggaaagcgataccgggccgatccccaaacagctgctgggcaactggcgcgtcagcaagatcgtgccgacccagaccaccggctgctgggatcaacagcaggcgcagagcctgatcggcggcaaaatcagctacaaagcggatgcgttcagctggaacggcacggcgctgaaaagcgaaggggccaccgtcagcaccgtagaagcgcaggagtttgtcgaggacaatgccggcagcagctcctacatcgatttcccgatgctgggcatcagcacgccgtcggtcgagcgcgtggccattcagcacgcggataccgccatcaaaggcatcaccgatcagggcaccgatggggtgcccggcgataacgtgctggtgaaagacgccaacacgctgatcctgtcgctgtgcaacgtctggtttgaggcgcagcgcgagaaataattttttgccttcagccccgggcgacggggctttcccactgcatcacctcccgccacgagcgccatttctgaactaaaattaatcataacgatatgaccccagcgtgatatcggagcctcggctcaaccgagtccatgacaggaggcgctatgtgttaccaccatattgtcatcgccaccgatctgagcgatgacggcaaacggctggtcgaaaaaggggcgttgctggcggaggcgctgcaggccaaactctcgctgatctatgtggacgtccactacgacacctaccacgcggcgatcggcttttcggagcgcagttatgacggcgtgccgttcgaagagaagatccgcaaagagctggaacccaccacgcaaaacgtcaattatccgatcgcggaagtgattatcgggcgcggtggcttcgttgacgaactgcgcacggcggtcgtggacaagaacatcgatcttctggtgttcggccatcaccacgatctgtggagcaacctgttttcttctacccgcaacgccatcaaccagctgaatatcgacgtgctggtgatcccgatccgatcataaacgcgggccaccgccgggcaacgatggcggtggccgccgcggcttattgcgtgaagaagtcgttatacaacatgtacagatgcgccgcgctccaggagaagttcggcgcgccttgctgtttgccggtgagcgggttgtagttctcgcggatcggcccgtcggcgaccaggccgtcggcgtggcggaagaaggcctgcgccatcgctaccgcgtcgtcgcgatagccgtagcgttccatgcccttgaggccgaaatacaactgatcgacccacacgcggccgcgccagtagatgtccgcgccgaacgccgggttggtcagcgccgcggtgccgagcggcacgtaggtattgaactcgcgcggatccttcatcaccctgaccaccgcatcggcgtgcggctggctggcggcgccgttgaacagcggcgaccagccttccggccctttgccgcgttcgacgatcggtttgccggcgcagccgttggccaacggccggctttcgatgcggatgtcatagaagaaaccgctctgtttatcgaacatgcaggtgttgatataggccgccagcttatcggctttggcgcggaaggactcggcctcggcgccatggcccagaatatcggccatctccgccaggtagcggttgtcgctgtacatatagctggcctgatccaccgactcctgcagcagcgagtagccgagcagcgtgccgtccggcgcgcggttttcggcgaatttcacctgccagtcttcgcgtttgccgccctgcgccacgtagcgcgccaattgatccggatcgataaagccgaataccgccgcatcgtcacggcccgactcccaggaggcggcggtctgcgccgggatcgcgatgctgtcgtaatgcccctcgcgcacgatgcgatcgtagttgtcgaggccggccagcgtttgctcgcgttgcccgcgtttgacggtaaacagcatgcgcccgtcgggagtattgtgcgctttgtcacgggtggcgccgtactccggcacgccgttgccgttgtgatcgcggttgcgcagccaccagtcatggtaagccaccagcttcgggtacatctccgccagccagcccttatcgccggtgacgcgatagacctccatcaccgcccaggccgccaggctcggcttggtgttgcgttcgttccagttgccgccgtcgccgccgcgctccgggctggggttgtaggcgataaggtcgggcaggaaaccggcgtcccacggccgcaaagcgtcgcccggccggatctggtaggcgaacaccgcgcgaatgttgtccttggccacgtccgggttgaagtgcgccatggcgtaggcctgtttccaggtgtcccacggccaggtctggttgccggagaaccagcgcccggtgaccgacggggtgaccgagtcgaacttcatcgccccggcggcgccgcgccagttgccgttcagcgtttctatcgctttgaccgccacacgcgtttgttccgccgtggcgtgcgggttgcggagcccggcggcgagatagcgttcccaacgctgggccgatgcggccatatagcgctgcgggtgagcgaggatgtcggcgatagcgcgctgttcgcgctgcgcctcgtcggcggtgagcaggtgcgaataggtggtgtacagcgtggtggtgccggcgatgcgcgccgtggcgcggaagcggtggccgtcgaccgtggtgcgctgcggcagcgatttatggatctgatactcggactggccggaggtcatcagctgcgacggcgcacgcaccttgccgaaggtgacgcgcaggccgtccgccgtcggcacaatgcggcgcgtgtagtccggaaacgcctgttcgagggtcgccggcggctgcggtttttgctctttggccgcgtagcgctccagcaattcgccatcccacaccagctccagcggcgcatcggtgataatttgcgtctccagcagcgaggtgcgcgcactggcgaagcgcagcgtcaggttgacggtaactcccggcgcgctgagccgctgcaccagggcgccgggcaggctgtaggccgtcatggtgaaagacaccggcttgccgttgcgatatacgctgagccgatcgaaattgttggccataaagttgatgtattcttcggtcagcagcgccgggccggggaaaccgcccatgccttccgggccgctcggcaacaggtggccatgccaggcgccgagatcgaagaacgggttgaagcgttgatgatcgtcgaagtcataatcgagcataaaatgcggcgcgccgtggcgatcgataacgtttgggtagcgttcggccagtggggcagtgggcgttttcggcgcgcagcccgccagcgtcagcgcgagggtgagggcggtggccagcggcgtcaggggagtcatgttcatcgtaggggcctcaacggttaccaatagaaatattgcatcagaaacaccgagttgctggcgccggtgctgtcgttgcgcataaagaatttgctgtccagcgcggtggccagcttaccgccggcatattcgtaccagatgccgaactgggcgtaggaggtggcggtatccgccgcgttatcaaaccggtggcgggcgtagctgtaggcggtggagaggtacagccctttggcggtttccgtcatcgcactgagcatcaggcccgattcgctgccgggatggccgccgctgtcgcctttgccggtgtggtgccagacgcggccggccaggtgtttgccgcgcagccccagcagaaacagctgccccaggccgtcggtcacctccaggccgttcagcagcgtcagaccgtcttgcagatcgtactgggtgtagccgttgatcatcgcccggtaggtgtatttgtcggagtagcggtcgtatttgccgaagtgcagcagcgccttgctctcgtcgatgcggctttccggcgccgccgtcacgctgtagcgaaagcgcccggtcaggttttgcagcttggcggcgtagctgagatcgcgggtgttggggatcacgtagccgtactccggcgtgaagtcgccccaccattgcagatcgtcgagcgacgagtcgttgcgtacgctgagcatcatctcggtgccgtcatcggtacggtaaccgccgtagaaacggttcaggcccccctcgaagccgccccagccgtgtccgggcgtccaggcgtggccctggctgtcggcctgcacggtccagccctcgccgtaaatcaggccgaaccagtgaccctgtttgatctcgaggccgccttcgatgtaggtgccgtcgctgtatttatgttgatgttcgccgttcaaatagacgctgccgccgatgccgagctcgccgtaaaagcgcagggcggtcgcggcggtttcgggcaacggcggcggcggcagctggttgcgctccgccggggtaacgggttcctgcgccgcccagaccggcgcgctgagtatcagtaacaagggcaacagggcgtgatgatttattgatgtcatggggcatgtgcctggtgttggatggatcggcgcgtcagtcgaacggcggctcacgcaaggtcgctcccggctccttgggagaagagataaagtccgcccggtcgcgggcggtaaacggcaggtatattagtaaaatatttagtaaaaaatacgctttaatcagtaaatcgttaacttgatcacaacgggtgaaatgggtatctttcgctgcaggcgcccggcagcggtttgtatgagcgagcgccggcccggtctgggaagagaggggcgggcggcactgtacgttgcgccgctatccgattaagctaccgtttttcgtctgtgcattgggactctatggccacactgaaggaaattgctgaagccgctaatgtgtccgtcgccaccgtttcgcgcgtgttgaatgacgaccccaccctgagcgtgaaggcgcaaacccgccagaagatcctggaagcggcggagcgcctcgaatacaagattgcgccttccaaacgacaaagtgggcaacgcctgcaattcgccgcgctgttcacctatacgcagggtgtggagatcaacgatccctattacctggcgatgcgctacggcatcgaaacgcagtgcgaaaaactgggcgtgatgctgagcgccggttacgactttaccggcgacaaggcgctgccggcggccgacggcctgctggtgatcggccggccacagcctgcgctgtatgagcagctcaggcagcaggaaacgccggtggtgtttatcgacggcgtggtggacgatgagcgtttcgactgcgtcaatgtcgacctgtacaagatcagccgcaaggtgatcgattacttcatcggccgcggctatcagcgcatcggctttatcggcgggcgcgaccatccggccggcatcgaccagcgcgagcaggcgttcgtcgagtatggccggcagcaaaacgtggtgcggccgcaggatatttaccacggcgatttcagcagccagtcgggctaccagtgcgccaaagcgatgttgcagagcaagaatggctatccgccggcgctgctggtggcgaccgattcgatcgccatcggcgtgctgcgcgcgctgcatgaacacggcattcaggtgccggggcagatcgcgttaatcagcgtcaacgacattcccaccgcccgctttattttccccgccttgtccacggtgcgcatcccttcggaaaccatgggcgcacaggccgtcaacctgctggcggagcggctgcgcgatgagcgcgccgtcccgctgtcgatcttcgttcccagctcgctgcagctgcgtgacaccaccgtcgcctgaccgccccccgcctcggcggggggcgttggcgctcaaaattaacgtcatgataaaaaaaggcatttgagatttattgtgatcctgtcgtcatttggtaaatatcggctgtagtttttactaaatatttactatcgtttccgcattgcacaggtgtcgggagacgtgacgtgaataattgggaaaacattgaaaaacagtcggagcaccggttggcgccgcgcgcgagcttcttcagctacgcggactccgagcaggcgctgagcttcgatcgcaacgccagccggcgtttccagctgctgagcggccgctggcgctttcggttcttcgagcacccggcgcaggtgccggcggcgttttaccgtgagccgatgagcgactggggcgatatggcggtgccgggcatgtggcagctggaagggcacggccacctgcagtataccgatgagggcttcccgtttccgatcgacgtgccttacgtgccgaccaacaaccccaccggcgcctatcagcgccactttacgctcgacgccggctggcgggaccagcaagtgctgatcaaattcgacggcgtggaaacctacttcgaggtgtacgtcaacggcggctatgtcggcttcagcaagggcagccgactgtgcgccgaattcgacatcagcccctatgtgcggcagggcgagaacctgctgtcggtgcgggtgatgcagtgggccgattccacctacatcgaagatcaggacatgtggtggatggccggcatctttcgcgacgtttatctgatcggccagagcgccactcaccttcacgacctgacgctggtcaccaccttcgatgagcgctattgcgacgcgcagttggcgatcgacgccgagctgcgccatctcggatcgccggccgccgagggctgccgcctgcaggcgcagctgttcgacggcgatcgctgcgtggcggagcagtggcgcgacgatctgcgcatcgagcgggcgctgatctgccgtttcgagctgccggtcagccgcccgcagcagtggaatgcggaaaatccctatctgtatcagctgttgctcagcctgtatgacagcgccggcaacctgctgggcgtggtgccgcagcgggtgggcttccgcgagatcgcggtgcgcgacgggctgatgtacgtcaacgggcgttacctcaaactgcacggcgtcaaccgccacgatcacgatcaccgaaaagggcgcgccgtcgatatggcgcggatggagcgcgacatcgtgctgatgaaacagcacaacatcaactcggtgcgcaccgcccattatcccaacgatccgcgtttttacgagctgtgcgatctctatggcctgtttgtgatggcggagaccgatctggagagccacggctttgccaacgttggcgatctgagccgcattaccgacgatccgcgctgggagcaggcttacgtcgagcgcatcgagcgccacgtggcggcgcagaaaaaccacccgtcgatcatcatctggtcgctcggcaacgagtccggctacgggtgcaacattcgcgccatggcccggcgctgcaaggcgctcgatccgacccgcctcatccactacgaagaagaccgcgacgccgaagtgaccgacgtgatcagcaccatgtattcccgcgtggcgatgatgaacgccttcggtgaatacccgcaccccaaaccgcgcattctgtgtgaatacgcccacgccatgggcaacggccccggcgggctgttcgaataccagtcggtgttcaaccgtcacgccagtttgcaggggcactatatctgggaatggtgcgatcacggtctgctgagccacgacgagcaggggcgcgagcgctaccagtacggcggcgattacggcgacttcccgaacaactacaacttctgcatggacggcctgatctacccggaccagcgccccggccccggcctgcgtgaatatcagcaggtgctgtgcccggtggaagtgacggcggaagaaggcgcaggcgacgtgctgcgggtgaaaaaccgctactggttcagctcgctggcggacatcacgctgaaggtcagcgtcaagaccgacggccgcaaggtggcgagttacgaattcaagctgccgcatctgcagccgggcgagagtgaagacatgcacctgccggtgctggcgctggggcagggggaaacgctgatcgacgtggcggtgcataaagacagcgccacccgctacagcgagagcggccagcggctggggcattaccagcatctgcgccaggcgacgacgcggctaccgactccaccggtggtcgatgcgccggcgctgcaatgccgcgaggaaaatcatcagctgctcgtcagcggcggccggttccagctggtgttctcgctgctgagcggcgaactgctgtcgtggcgggtagacgatgaagaaatagtgggacgcgcgccgcgcatcaccttcttcaaaccggtgatcgataaccataaacaggaatatgaggggatttggctgccgtatcacttccccatcatgcaacagcatttccgccgccttagccggcaatggcagggggacgatctgctgatcgaggtgcgcagcctgatcgcgccgccggtgttcgacttcggcatgcgctgcacctatcgctggcgcatctctccgcagggctgtgtcagcctggatctggccggggagccttacggcgatttccggcaggtgatcccgaaaatcggtctcgatttcggcatcagccgccgcttcgagcaggtggaatactacggccgcgggccgggtgagaactaccgcgacagctgccgggccaaccttatcggccgctaccggcagcgcgccgatgcgctgttcgaacactatccgttcccgcaggacaacggcaatcggcaggacgtgcgctggctgagcctgcaggacgcggcgggcaaggggatcttcatccaaccgcggcggccgatcaacttcagcctgtggccgtacagcgccgagatgctgcatcaggcccagcacatcaacgagctggagcctgacgattgcctgacgctgaacctggacgatcaggtgcttggcctcggctccaactcctggggttccgaggtgctggacacccaccgggtctatctggcgccgttcagctacggcttcacgctggtgccgttcgacggccggcaaacggacggcgccgcgctcgccggttatgacttcgcgccggcccctcatcacccgcagtctgcggaggaaaacgcatgatcattctcgaatccctgacggagtttcagcgcatttatcacagcggcaagaaatggctgcgctgcatggaggcgatcgccaatgtcgatcgcatcagcccgaacgtgtgccattcgatcggcgactcgctgacctatcggctgagcgtcggcgccggccggcagcacggctggctggaaggcaaccgccgctacttcgacgtgcactactacctcgagggagaagagatcgtcgaagtcgccgacaaacgggcgctgacgacggtggcgccctatcaggacgaaaccgaccgcgagtttttcagcggcgaaggcgagaggcgccgggttggcaaaggcaacgtggtgatcttcgaaaaccaccaggctcaccgcttcaaagaaagcggcaaggtaaaaaaagtcattttaaaagtgacggtggaagacagctatttcatcaacaaatagcgcgaccgccgatcgataacaacaaaccgaagtcccctacaccattcggagaatctctatggctgcgtcgaacagaaacaccatcggcaagtttggcctgctgtcgatgacgtttgcggcagtgttcagtttcaacaacgtgatcaacaacaatattcagctcggcatcgcctcgtcgccggtattcctggtggcgacgatcatttacttcattcccttttgcctgatcatcgccgagttcgtctcgctcaaccgcaactccgaggccggcgtctatgcctgggtcaaaagtgcgctcggcgggcgctgggcgtttatcaccgcctacacctactggttcgtgaatctgtttttcttcaccgcgctgctgccgcgcgtcatcgcctacgcttcttacgcgtttttaggttacgactacgtgtttacgccgctgaccacggcgatcatcagcatcttcctgttcgccttctcgacctacatctccaacagcggcgcaaaactgctggggccgatgacctccgtcacctcgtcgctgatgctgctgctgacgttttcctacatcatcctggcgggcgcggcggtgctgggcggcatcgagccggccgatccgatcaacgtgcaggcgatgacgccgaacttcaactgggcgttcctcggcattaccgcctggatcttccaggcggcgggcggggcggaatccgtggcggtgtacgtgaatgatgtgaaaggcggcagccgcgccttcgtgaaggtgatcatcgtttccgggctgttcatcggcgtgctgtattcggtgtcatcgctgctgattaacgtattcgtgcaccgcaccgacctgcattttaccggcggtacggtacaggtgttcgaaggcttgtcggcgcactttggcctgccgacggtgctgatgaaccgctttgtcggcatcgtttccttcaccgccatgttcggttcgctgctgatgtggacggcggcgccggtgaaaattttcttcaccgagatcccgaagggcattttcggcgagaaaaccatccgcctgaaccggcacggcgtgccgacgcgcgccgcctggatccagttcttcatcgttatcccgctgatgctgatcccgacgctgggctccagcagcgtgcaggatttgatgaacacgctgatcaacatgaccgccgccgcctcgatgctgccgccgctgttcatcatgctggcctacctgaatctgcgtctgaagtacgatcgggtggcgcgcgatttcaaaatgggctcgcgcctgcagggcatcgccatcgtcagcgtgctgatcgccatcttcaccgtcggcttcttcgcctcgacgttcccgaccggcgccagcatcatgaccatcgtgttctataacgtcggcgggctggtggtgttcctcggctacgcctggtggaagtacaaccgctactcaaagactctgaatgccgaggcgcgctaccacgaagacatgccgctggcgcgtctcgcgctggaagcgcaggagggggcgcctgccggtcaaccggcgctgaccacgcccgcatgcaataaaccgctgtaattgctcacctctcgactccgcgccccggcgcggagtctcgccttgcgaaaaaaatctgcctctgcgtttgcataatacataagtgaatactaatgtgtttgtatgaacgaaaatgacatcttcaaggcgttggccgatccgacccgccgcagcatcttcgacaaactcgctgtcgccagcatgaacgccagtgcgttgcgcgaagggctgcccatcagccagtcggcgatgtcgcaacacctggcggtgctgcgtaacgccggactggtacgcgagacgaggcaggggcgctgcgtcaattaccaggtcgacccggaagggctggcgcagatcgcccagtggctggcgaagtaccgcgcctactggccggcgcgcatcgacgcgctgcaaactttgctgaaggacatggatcaatgaacaaacaggctgagcggccgccgcgcgaccggctggtgttggaatattcgctcgaggcgccgccggaaaaagtgtggcgggcgctcagcgttcccgaattgcgtgagcagtggctgccgacgggggatctggcgcaggccgagccgctggccgccacgccgggcgaggcggtgagctatcgcttgcgcgacgaccaaccgccgtttctcgaaagcgtcgtcaccctgcagatcgtgccggacgccggcggcggcagcctgctgcggattatccaccagctcgatgccgccaacgatggcccgccgacggtgatgcgcgccgcctgacgcgttaaacacatttccctttgttgccaacccaggagttcaccgatgcgtgagaagatgatgctcgtcccgatggtggtggaacagaccagccggggagaacgttcctttgatatttattcgcgtctgctgcgcgatcggatcgtgttccttaacggcgaagtcaacgacgacgtggccgaaatgctgtgcgcccagctgctgtttctggaggcggaaaacccggaaaaacccatccatctttatatcaactcgccgggcggagtgatcaccagcgggttggcgatttacgacaccatgcagtatatccgcgccccggtgcatacgctgtgcatgggcaccgcgcgctcgatgggctcgttcctgctgatggccggcgaatcggggcaccgcatggcgctgcctaatgccagcctgcacgtgcaccagccgctgggtggctttcaggggcaggcctccgacatcttgatccacgccgaagagatgaagcgcaccaaagacacggtgattcggttgtatgcccaacattgcggcctaagttatgaagaggtggagcgggtgttggatcgcgatcgctttatgaccgccgacgaagcggcggcctgggggctgatcgatcgggtgctgcgggcgcgctaaagggctcaggagtgcgtggcggattgtagcgtttgccaaacccgttcaagtccgaattcgaccatcgcgaaatagagactaaaatagcgctccgccatgatgaagaacgaactgttgagttcgatcaccacattattggtggtggtcagcaggccggatttttccgccgcctgcagaatgcggttcacgtgcgcgcgtgagacggagcaggacttggcgattttcgccgaggagagcagcagaaagggggagtcctgtcggatgctttcgataaacaacatcaacagcaccatgtggccggcatctttgctgatgaacagcgcggattgcggcaccaggtcgatcaggtagacctccttgagcatcagttgcccgtaggcggcgaaaaaagtggacagaaagtcgggcgccgccagcagcgccgcgatgggcatctgtggcgccagcgcctgataagggcgcgccattgaggcgatcagcgcctgggtttccgccagcgcgtgcggcgtaggcttatagcgtaactggcgtttgtcatgctcgcagggtttgacctccagccggcgcccgacccgtaaaaagaacagaaaggaatccagggaattctcgctgatcatattcttccctttgaaaaaggctttgatgtctttcagcgcggcggcgtgctggtggtaataaatggacaggatggtggagcagatgatgaaccggctgttcctgaaaatgattttgtaaaacagcggatgcttcttgtaggtctccctcaataattccccgtgtttgacgatggcggcgtggaacgccggtgactgcctgatgatgttggcctgtttctccaggtgaaactgtagctggaatctgcttagactcattttccctatttcctgtacttaaaaaatgtgctgctttttatcgttatgggtttgctgtgtatggcttgacgatctgttggccctggtcgttgatgagagtggcctgaacggtgacctgagaagggagtgtcggcgctgcaacgccgtccaggtgataatctcgcgtgctgaacggcgcggtcatcatgtcgctttcttgccgcaccgggtaatcgcgcctgtcggcgtgcacggcgatgcgcgcgaacgagagataaaacgccgatcggttttgacagcgcagcagataaccgtccggcgatttttgcagcgtgaatgagacggcctcggtcgcgttctcggctttcccctgcagcgctctgggccggtagaagatcttcatctgggtgttcatcgccagcgtcacgcgcgacgccagcggcggcgtggtcggcgggttaggcgggatctcatacaggttgagccagaataccgactcccggtcggcgggcaggttagcgccggcaaacaggatgcgcagccctttcagcgcagaaggcggcagggcgaaaacgctgggcagggtgacaaacggcgcgcgggacagttcgggggcggcgttgacgtcaccgttatcgacccaggtttgcgccacgatcgggtagccgttggtgttgagcagcatcagggttttttccgtctcgccctcatgaaagatcacccgcgtggcggaggcgatgatgcccgcctgcgcgccgatggaagccagcgccagcagcagggcgcatcccatcgtcagatatttctttctcatcattgcaccttaacccagacgtaggccctggcgtccaccttgccggcggtgacggtttggccgggcagccgggcgagcgtggcggtgagctgggtggtgtagtgggtaaaccccgccgcggtgctgccgccgccgctggcgccgttgagcaccgggtaccagccggcgtcgttgccctgcgggcattgcccggcgctgcaacgcgcccagccgacaaagttcatcggcgcgccgttgccggcgttggcgagcgcgatgcccacgccggtggcgatgctgctgtcagtgccgtagccgctggagagcaggtagctcacgccgccgttggcgctgaccagcccgagctgctgcgccgcgacatagctttcatacggtacctgcaggccgagggcggtattgttgctgctgacgccggacacggcggcgttgtcgcattcgatattgatagtgaactgcgcctgtgaggtttgcccggcggtcaactggctgacggaaatggtcggcaggatcaccagcggcgtgacgttgcgcgccacgcaggtggcggtataggtcaatgaggagatcggtgcggtgcccatgcccatcgcgttccagcgcccggtgccccaggtggcgtagttggtggcggaatcgctgccgataggatccgaagcgatgccgggcccctgaaaggtaacatagccgttcggctgcgtgcaggtatagttcgaattgccggtggtcgacgccatgcccaccagcgggttgccggcgctgtagccgcagtagttgctggcgcccgcgcccggcagcgagctgatgcggatcagatcggcgcggatggcgctgaagtctttcacccggatctggattttgttgccgacggtggcgtagcgggtaatcggcgccgactgccagtaacgggtaaaaaccttgccggaatccaggtgggtcaaacggatgccgacgtaagggaagtaggtggcgtaatagttggggttgccgtccctggcgcccagatcgaaatagccgccgacgcgatcgtcgccgttggtggcgaagacttcataaatttgcccgacatcgccggcatcgcattcatacagcaccttgtttgggtcgggatagcgggtgccggaggtcagatcgaacacgctggtgccgagcggcgtgccgacgggctgcagataggtgctggtcaggttgacccggcccagcgccgtgcctaccccgcaaggatcgcagccggagtcgatccagggggcgacacgcgtgcattgcgccagcgccgcgggcgcgccgaacagcgacagggcgaacagcgccggggcggcgaccagataagaaatgtgtttcatcgtctctcctgagatcagttaaacgggctagcggcatggggcgctgagccgctgaatcgggctgtcttccgcggcgggcaggcgataatgcagcgtgcactgctggccgggcgcggcgccccagttcagcgtcagttcgccggcgctccgatcgctgcgtaggtacacctggttggcctggccgaccatgcccacgctgttgcctgccgcgtcaaggacgttggcgcccattgggatcggtgcgttatcgggccgctgtgcggtgatcagcagcgcctggccgcgcacggtgttgaagcgcaggcgcaccgtggcaccggcataaggagccacgcgccgctggccgtcttccagttccgctttgtcgttcatgccctcggggttcagcgcgacggtgttgtagtgatagggcaccagcgccggcgccagcgcatagccgaagcgatcgacgcgcgcgccctggccgtccatcacccgtgcgccgctggcgccgggcgcttcgatcagggcgaaggtgtcgccgacatacggccctaatgtcacgccgccgcggtgcgccaccaccgcgccctgcagcgacagggagccttgtcggtactggcgcgcggtggagaacgagccggtgacgttggcgtaaggcaggcgggtttgcaggttgccgccccagacgctttgttggcgatcgtcgtcggtggtgaagttcaggccgtaactgaccggctgttcgtcgccgacgctgcccgacagcgcagcctgatagttgccgccctgaccctggctgtggttggccagcagcgagacgctgggggcggatgatgaacgcccgagcgggaagctcagcgacagggcggtgacggtctgcgcgttctgcgccagcggcgcgctgtagacgttatccagcggcccgtagccgcggtagtcgccgttgctgtagcccaggctgcgggtgcgggtgacggagaggttaagcgccacgccgttgccgaaggttttcccccagcccagctggagctgattgtcgcggccgcgctgatcgcggtagtcctgagtcgagccggacatcgtcaggctgccgaacgcgcccatgccctgattgacggccacctcgaaacgcgaacgctggtggtaggagtcggactgccagttttggccggtaacggcggcgcgccgcacgccgagcacgtcgctgagatcgcgaaagccttcggtagagtagcggtagccggcgatggatagcgtggtgtccgtcgggctgaaagttcggctgtaagagaggtgcagcatccagccggaggcgccgccgtccggcaggctggcgtgggaataggtggtatccatgccgaaggcgcccagccagctgctgtacacgccgcccagcatcatcgcctgatagccgtccgccagctgattgccgaggttgaaggtcagggcgttggtcaggccgtgctgccaggtcacttcgctgaacagatcgttgtcgccgacgtagcgggaacggccgacgatggcggagtagcgcgactggccggggcgaatggattccggcaccgcggcgaacggcacggtgaaggtgctgacgctgccgtcggcttcggtcaccaccacggtcagatcgccggcgtagttggtggcgtacagatcgttgatggcgaacggccccggcgccacggtggtttcgtacagcgtgcttttaccctgcagcaccgtcacgcgcgcgttgcttttcgccacgccgcgcaccaccggcgcatagccgcgctgtgaatccggcagcatgcgatcgtccgagctgagctgaatgccgcgaaagcccaggccggagaagaagtgcccgtcggtaaagccttcgcccaacagcatttcgctgcgccagggcaggattgcgcgctgcacgtagcggcggctggtgtccaggtgaccgccgaactcccgatcgtagcggtagctggactgctggcggtagcgccagagcccgaggttgaacccgccgttcaggttggcgtaggtcgaatcgagatcgcgggtttgcccctgccggtagctgacgtggtactggttgaggttgtaattgacgaaggccattgattcgccgctgtccaggctggcgggattgacgctgccgcgcggccggccgttcaacagcgcctgcggaatgctgagatccagccgcagccgcgagatatcggcgttcaccatgatgtccttcagatcccggccgggcagcaggcatgccgtttcggccgccggcggatttttcagcccgaagcgcgtcagctgcggccgatcgaaacagggcagcacctgtttgcctgcgcgcacgaagcgaatttgatcgcgctcgagaaactggccgttgaggtacagatcgatctgatagctgccgggggcgacggcgtcctgctggttgaactgtctcagggcgctgttgctcagcacgctgccgcgcagcagcgcgggatcgaaggtgtagccgtcggcggcggcgcagcccaacggcaacgccagcagcgcgcagcaccagcgtgcgggcaacggcgtcgccttgcggacatcgaacatgaaaacctccctgtctggtttcagcgcgcgacgttcagggtgcgcgtgatttccaccccgtagtcattgatgacgcgcagcgcgacctgccgcacttccccgttcaccggccaattggcctgtgaaaacggcgggatcagatccgcctgcggaatggcgctgcgcttcgcgccgctcagaattaccgcctggctgacgttggcgtagtagccggtcgggttgtcgacgcgcagcgcgttgccgacctgacgcaggctaaggcgatcgatgacgtggttggcgtcgccggccagcccggccgggcgatagaacactttcagccggttggtgaccaccagcagcagtttgttcttgtcgctgtccgtctgacgcacggcggggacctgcaggaagttgaggtagaacagcgattcgcgatcgcgcgccagcggctggccgacgaacgacagccgcaccatttgcccgctgtgcggatccatgcggaagatttgcggcgaggcgacaaagggcgcatcggcgttttccggcgtggactgcgggttgttgatgtcgagccagatctgcatcagcgccggggcgccgtcatcgttggtgaactgcagcgttttctcccgcgcctcggcggggtagatcacgcggttgccgagcagcgttacgctggccaaggcgtgggtggcggcaaaactcatcaggcaaagcgacagggcggcccatcggcgggcggaacgggatatctgcggcataaacgtgaaccgataaagaagcgagtcattcagcgccgtccgctaaggaacggcgctggcatcaacaggtatggcgcctgacgccggcttatttgtagctaatggcgaactgggcggtggcgatcaccgaaccggccgccacgccggtgtcttccgcgtagtagcgggccaccaggttctgcgaggtggaggtggcgtctttcgccagcgtcatcgccgacgtggtgacggtcgaaccgctggcgaatgacagcggcgtggtggcgtcgctgtccagcagttgaatggacaccttggccgcatcgcccgcgttgcccagattgccgttggtggtcgggttgttgcccgccaacacggttttgatcgccgtatcgctggtcgccgccgcacaacccgtgacgttaacggtaaaggtggtgtcgccggcggtggcgcctttggtggcgagtttgctggcggcgacggttggcagcaacacgaccgggttggattggttgccgttaatattcaccgaacaggtttgcgtgctgacttcgcctttgaattgcacggtattggacgaggcggccgcacaggcgccggagagagccagcatggataatgcgactaatttaacattcatgtgaaataccctttaattaactttagagaaaagctttcctgacagtaataaattactgacgtgcgtttgttgattaatcatgttgcgcaattgttttttaaacgcgtcggcaaacatggattttcatcctaacaaactaagaattttccctataggtgttttccgcatggtaataagttggtggtgcgggttgttacatttattttcatttttgcttatatcatacaaaatggaaaatagatctatatcattgcgttgcgtttttattggatcgtcggtttttgtttatgaaataatttgaaacattcatgccttttttgcgtattaatcaaagtgctggctgttgcgtgattatttgaaaaacatgttatcaagttgttttatatcggtgtgctttgcaggcgaattaccccaaaaaagagcagcgacaagccgcctgaggtgtggaagcatactttcacgctgataaggagaattaaagtgagagtgatttatatcgacggttcgccgctatgccgtttggggatgaaaacattattgggagaaggagtgataaccttatcctcgcccaatattaatattattaaaaatataagccctgcgcctgatttaattatcatggattttccccatgaaatttaccggttcgaagcgtatttgcgatttattcacgcctcacgtgctgaatatgaaggcgtccggatactgttcttcgtcgataagacttcgccgctgatcctggcatttatcgcggcggcgcagccggatgcgattttgcacaaacgggaagcgctgcgggtggtgcgggaaacctgcgcggcgctagtccgccgtgaagagacgggcgaacggcgcgtggtgagccggcatcgggcggcggcgatcacgcctggcgaggcggcggtgttgtgtgaaaccgcccgtacggaagatatccgccagactgcgcggcggctgaatttgcacccgaaaaccgtttattcgcacctcaacaatgccggcaagaagttcggcatccgtaatcgggtggaactgctgaagatgattgcgctgctgtagcgcgccgttaacgggcctggcctacggccagccgccatcgcgtgatctcatcggcgccgggcccggcggccagcgccaggctttgcggcggcagagattcgccggtcacggcatctaccacgcgcagggtggcggggtggccggtcacgcggtcaactacgcgcagcggcggcccggccagctcggacagattccatttgtcgccaatctgaatcatcgccatcaccagcagcccgagatcttttcccttctccgtcggcagatactcgtagcgatcgggacgcgtctggtattgccgcttttcgataaggccgtggctttccagggccttgaggcgatcggtcagcgtattgttggtgatgccggtcgattggcgcaaatcgtcatagcgcgagagccccagcaatagatcgcgcatgagaatcgcgccccagcgatcgcccagtgccgacagcacgtgcgccaccgagcacgtcataccttcaaacccttttgctttcacgttgccttacctccgcttgccgcctgattgccgagaatgttatcgcctcggcttgataacttcaataattggagttattactcttattattggagtttatcattaacagcggctgatggcttgaacgccggccggaaaacctaggagataacgcgatgccactgtggcagatttaccacccggagccggccttcagcgccgccgataaacgcgcaatcgcacagaaggtcaccgccctgtatcaggactttttgccgcgtttttacgtcaacgtctttttccacgcgctgccgccaggatcggcgtatctcggcggcgaagcggccgatgatttcgtgcgggtgaccatcgaccatatcgcgcgcgccatggacaacgacgcagagcagcagcaattcctggcggcctgcacccgcatcctgcaaccctacatcgccgcacgcgggctgcgctgggagctgcacgtggacgaaacgccgttctcgctgtggaccattgacggattgaaaccgccggcgccggggacggcggcgggggagaggtggcgcagcgagaatcggccttcggtgtgggagggggataaccgcgagaaatggacataatgagcaacggtaaccgcttgtggactatgaaataatgcgtactgtatctgccgaaaaaaattgaaaggcagcctccaggaggctgtttttcggaagtgttagaatggataaaaatgtcgcttgcagggagaagccatgtctcattcatcagcgaggaaaaaagtgttgaatacagcaatgccgctggcacacagagcgtctcacgcgcgcagttgtgctaaccatgtggcgaaccggttgggaatgactcgcagtgagcttctaataaaagttgagaaagagtcaggctcaaatctggaatcaccgttaactgaagaagagctgatgaacgcattcaactatatggaaagcctttaggattaggccgctttaagccgcacaaacatctaatattgagcgttcagattggaaaagaggccagtaccgttctttaagcattgatcatgggatgggatactttaactctatttcaggtgcatcagctaaatgtctgccagagcgggccattaaatagccggcaatctcttcagttgtcagttcaacatggaacatatcaggatcctggaaccattcatccggccaaaaaatgaggtctgacggattgccatcaaaatttttctcaagcagtgcaagagcgaaattttgttcggattccttgcttttggcatcagacacacagcgaattgtctgaactaattcatcccaggtaaaatccatatagaatttttccagattgaaagccatgcgggtaaactcctcggcactggcccaggaggagaaatctctgaaatctgaaaacgtataggggcatgcaacctggctgttccatttgactatcattgcttctaaaacggaatcttgttcgtcaaaaccttcgtcaattcttgaaagtatctgcttagctttgtttgccagctcattgatctttttgctactgacttttgtgggtctcattcggtcaggtagaggcatcgctatcatccctgtctagcttactcatatccaatgggggaactatcttactgcagatgcggaagtattaagtagcataaaattcaatcatgccggatagatgggtaaactttccgttgcgcatcgcaatgttaagtacgtttcgcctccagcattagatcccaatagatcccaatctttactccgataagccaaaacgcagaaccgagagacaaaaaaatccacgccgaagcgtggatttttccgtttccggcagcggagagaaacgctgcggggaaggggttagacgttgaacaagaagttcatcacgtcgccgtctttgacgatgtagtctttaccttcggaacgcattttgccggcttctttggcgccttgctcacccttgtaggtgatgaagtcgtcaaaggcgatggtttgcgcgcggataaagcctttctcgaagtcggtgtggatcttgccggccgcctgcggggcggtggcgccgaccgggatggtccaggcgcgcacttctttcacgccggcggtgaagtaggtttgcaggttcagcagctcgtaaccggcgcggatcacgcggttcaggcccggctcttccaggcccagctcggccatgaactcgtcgcgctcttcgtcttccagctcggcgatatcggattccacagcggcgcacacggcaactaccacggagccttcggcatcggcgattttacgcacggtgtccaggtacgggttgttctcgaagccgtcttcgttgacgttggcgatgtacatggtcggcttcagcgtcaggaagctcaggtatttgatcgccgctttgtcttccgcagtcagatccagcgcgcgcagcatgccggcgttttccaggtgcggcaggcatttctccagcgccgccagctcggccttggcgtctttgtcgccgcctttggcttttttctgcacgcggtggatggcgcgctcgcaggtgtccaggtcagacagcgccaactcggtgttgatgacgtcgatatcttcggccggatcgaccttgttgttgacgtgaatgatgttgtcgttctcgaagcagcgcaccacgtggccgatggcttcggtttcgcggatgttggtcaggaactggttgcccaggccttcacctttagacgcgcctttcaccaggccggcgatgtcgacgaattccatggtggttggcagaatgcgctgcggcttgacgatctcggccagcttatccagacgcggatcgggcatcggcaccacaccggtgttcggttcaatggtgcagaacgggaagttggctgcttcaatgcccgctttggtcaacgcgttgaacagggtggatttgcctacgttaggcaggccgacgataccgcatttgaatcccatgttgtaatcaccttaaatatcttaactatcagctggttagatttaaccgactgcataaagggcaaaataatgccgccattatacacgtaatgggcgtttatctcgatcagacttgcttggccggggcgaacgcagcgcggacggccggtttttatttgagatttggatcacatttacccatactggccattccgattaaccgacaggaaacgcgccggatgtatttcttgcctacgccaccctgagctgtgcccgcctgcactctgccgccccttgcggctccccatacccgctacgcggggagatgatgtcatctgtcataagtgaataatgcatgtttaatctgagtaacgtcaggatcgcggacgttaaaaatgaagtcctggcgggctttgtggtggcggtttcgatgatccccgaggcggtcggcttttcgctggtcgccggtctttcgccaattgtcggcttgcataccgcgtttattatcggcctggtcacggcgctgttcggcggcaaaccgggcatggtttccggcgccgccggctccattgtggtggtgctgatgagcctggcggcgcagtacggcatgggttacgtgctgtgggccacgctgtttgccggggcgattcaaatcctgatcggcgccttccggctgggcaagttcattcgtctggtgccgctgccggcgatccacggcttcgtcaacggcctggcgatcgtcatcatgctggcgcagctgaagatgatcgccgggcaggggccgctgatgtacggcctggtggcgctggcgattgcggtggtggtgctgttcccgcgcctgaccaaagccattccgtcttcgctggcggcgctgctggtggtctcggcgttggcgatcggcctcaacctgcacacgctacgggtgggcgatctggcggacatttccggcgcgctgccgcactttagtctgccgacggcgccgtttaccctggagatggtgcgggtggtgctgccctatgcggtggtgatcgccctggtcggtttgattgaatcgctgctgaccatgacggtgctggatgaaatgggcggcaagaagggcaacggcaatcgcgagagtatcgcgcagggcgccggtaacgcggtatgcggcctgttcggctgcttcgccggctgcgcgatgatcggccagtcgatcatcaacttcacctcgggcgggcgcgggcgcatctccggtacggtgggcgccatcctgctgattctgttcgtggtcagcctgtcgcgctatatcggcctgctgccggtggcggcgctggccggggtgatgctggtggtgtgttacaacaccttcgagtggagctcgctgcgccgcttgcgccgcatgccgaaagccgacgcgctggtaatgatcgtcgtcacgctgatcaccatctttaccgatctggcggtggcggtgatcagcggggtgattatctcggcgctggtgttcgcctggcagcaggcgcgcatccgcgtgcgccagcggcaggtgacgggcgacgtggcggtgtatcaactggatggcccgctgttcttcggctccgccgccgctttcgccgagctgttcgatccgcagaacgatccgcagagcgtggtgctggattttgccggcacccgggtgatggattccagcggcgtggaggcgatcgataagctgacggcgcgttatctggcggcggggaaaagcattcgtctgcgccacctgagcgctgactgcgtgcgcctgctcaaacgcgccgggccgttctgcagccatgagctggacgatccgcagtattacgtggcggaagagggcttcacctccgatgagcgccgggtgggcgaggaaaccttcaacccgcgcggctaaaagcaagcagcgggcagggcgcccgctgcggcaaggatcaggcctgcgccttgaagctgtgcaggcgctgaacggttttttccagcccgtccttcatcagcatttcggtgcagcgcagcgactcgtcgatcgcttcgtcaatcatcttctgttcgctggccggcggcttgccgagcacgaagcccaccaccttgttcttgtcgcccggatggccgatgccgatgcgcaggcgatagaagttcgggttgttgccgaacttgttttggatgtctttcaggccgttgtggccaccgttgccgccgccgagcttgattttggccacgccgggcggcagatccagctcgtcgtgcgccaccaggatctcgctgggttcgatgcggtagaagttggccatcgccagcaccgctttgccgctcaggttcatgaaggtggtcggcaccagcaggcgcacgtcgttgcccgccaggttcaaacgggcggtgtagccgaagaacttgctctcttcttttaactgctgattgtggcgctgggccagcagatcgacgtaccaggcgccggcgttgtggcgtgtctgggcgtattccgcgcccgggttggcgagaccgactatcaatttaatactgctcactgggagattcgctatgatcagggtaatggaaagggccttagtctacctgtcggggcgatgaatgacaaaacccgatctctgccgtcaccctgggtaagaaagacgaatgattcattagctgaataattcaatttgtccgctaattttcagtgccgtgttaagaagtgtcaataattctttaccatttgtgatcgcctccgcaatccccttgccgcaacagggactatacttaacttatcaaagtgggttaacaagttgcagcgttatcccggttggcacatggcaatcatggaggtggcatatgaaacgtagaagcgcggacagagtgggcaacttttttatggggctggggctggtcgtgatgatcggcggcgtcggatactcaattattgctgaagtatcccagttcaatctgccgcaatttttcgcccacggcgccatcatgagcatcttcgtcggcgcgctgttgtggctggtgggcgcacgtatcggcggccgcgaacaggtggcggatcgctactggtgggtaaaacactttgataaacggtgccgcaacgatcaacatcgttcgtcgcattgattaaaaaagcagaagggaagcaagagcggggcaagggaacatctgccgtgcattaaggtttgaggtcatgtcggagtacaagtagaaaacccgttgttgctcgcgcaccaacgggtttttcttttctgctgtcgggctcgctatctttccggcgcagtgggcgccgcaccggaaagacgacgaaattaatgctcgaacatcgcagagatcgactcttcgttgctgatgcggcggatggcttcagccagcatgccggacagggtcagagtgcgaacgtttttcagtgccttgatttccggcgacagcggaatggtgtcgcagacgatcacttcatcaatcaccgagttcttgatgttgtccacggcgttgccggagaagatcgggtgcgtcgcgtaggcgaatacgcgcttggcaccgcgttctttcaacgcttcagccgctttacacaaggtgccgccggtgtcgatcatgtcgtcgaccagcacgcagtcgcggcctgccacgtcaccgatgatgtgcatcacctgagaaacgttcgcgcgcgggcggcgtttgtcgatgatggccatgtcggtgtcgttcagcagtttggcgatggcgcgggcgcgcacgacgccgccgatgtccggggaaaccacgatcgggttttccaggttctgctgcagcatgtcttccagcaggatcgggctgccgaacacgttgtctaccggtacgtcgaagaagccttgaatctgctcagcatgcagatccaccgtcagaacgcggtcaacccctacgctggagaggaaatcggcaaccaccttggcggtgattggcacacgcgcggaacgcacgcggcgatcctggcgggcatagccgaagtaagggataacggcggtaatacgacctgcggaggcgcgacgcagggcgtcgaccatcacaaccagttccatcaggttgtcgttggtcggggcacaggtggactggatgatgaaaatatcaccgccgcgtacattttcgttgatttgcacgctcacttcgccgtcgctaaaacgacctacagcggcgtcaccaaggctggtgtacaaacggttggcaatacgttgtgctagttccggggtggcgttaccagcaaaaagcttcatatcaggcacgagaagaacctcaggcttgcgtccagagaagatattgtcatacgacatcgccaaggggcagtcggcgacgccggcgcaatatacatacgggtatgtaaaactaaaattgagaccgcaggcagcgcagggataacagggccaggtgtgcatgaccctgcgcagcgaaacgttgagctacgactcaaaccgcccggaacgaatgcgatgtagtggggagacgttaacgccgcgcgctacaaaaccacacaaccactccggggcttgatttaacacctgacgggcagcgatttctgtgtcgaattcagcaaacacacaagcacctgtgccagtcaggcgtgacggggcgtattctaacagccatgaaagaagctgttcaacctcgcgaaaacgttttcttgcgatcggttcgcaatcatttgcgtacggcgcctgcaacagctcacttaaggagcgaaccggggtgtcccttttcaattcggcgtcgccgaagataaccggcgtcgggatgccgacgccgggatgcgccaccagataccatttttcctgcggctcggccggctgcaggcgctcgccgatgccttcggcgaaggcggcgtggccgcgcacgaacaccggcacgtcggcgccgaggctgagccccagctctgccagttggtcgtcgtcaaggccgcagcgccacagttcgttcagcgccaccagcacggtggcggcgttggaggagccaccgcccaaaccgccgcccatcggcaggcgcttgtcgatgctgatgtcggcgccgcgcggtgcggtctgcagaccctgttcatcacaatagcgctgcagcaggcgggcggcgcgcacgatcaggttctgctcgtccggcacgccgtcgaccggcgtcagcaggttaatgcgatcgtcctggcgcgggtcaatggtcagggtgtcgccgtagtccaaaaactggaacagcgtctgcagcaggtgatagccgtcttcacgacggccggtgatgtacagaaacaggttgagcttcgcgggggagggccactggcggatcatttgagcgtccagttatccattttcagtttgatgcgttggtcgccctgctgcagctccagacggttcggcagcgtcggctgcacctcggtgctgtagctctggtaatccaccttccaggtttgaccgccttgctggtaggtcagtttgctcaggcgatattggtcatccagcgcaaaatcgctggcttcgcccggcaggccgaccatccactggcgcaggttgttcagcgggatcgccatcccggtcagcttgcggatcatctcttccgggttgtcgctgacgtagcgtttgccctggttgtcggtcagctgcaccacgtttttctgtacgttgagatccatttccgtgctgcccagcgggttagtcagcagcaggcggtagcgctccggcgaaaactgctgccagaagaagcgggcatagacttttttctgatcagacaagtaggcgaaggagccgcgggtctgataggtgctaagctgctgcaccgcctgctcatgggcgcgccactgcggtgaggtcgggctggtggccgggccggttggcttggtggtggtacaggcggccagcaccaggctggccagcgggatcagacggagcaaactaactttgcgtattggcataactttttcttgtccttttgtccttgcgggcatgcgcgacgaaacccggattcagcgctcacgctaacggggcggcggcggcgcgtcaattttttgctgcatcgcgttgaatcttgccgcgtttatcggcgtagtgccaacgcggcgcgcgcgtcggggttgccattaagcgtaacacaatcgcctgaaggcgggggaggcgctcccgataagcggtgcagagttgcgcaaacgccaacgttatgtgcgccgaatagcgtgcgcgtcttcgcaaactgcgctaaaatttaaaccatctgcctaccctttgactatttatcccgctgtatttattacttattcattaattgatgtcgtctatgacagcgattgaacggaagatgcggttgttacttttattgatcccgcgcatcaagtagaatgccgttcaacgagaacccgtaccaacagaagtattactcgaagcaatgaccctgctggcgttaggtataaatcacaaaaccgctccggtttctctgcgtgaaagggtgaccttctcgccagagtccatcgatgaggcgctgaccagcttgctccaacaaccgttggtgcagggcggcgtcgtgttgtccacctgcaaccgcaccgagctgtacctcagcgtggagcagcaggagcacatgcacgaacagctggtcgcctggctgtgcgcctaccacaatctgcgtccggaagaggtgaagaaaagcctctactggcatcaaggcaatgacgcggtcagccatctgatgcgggtggccagcgggttggattcgctggtgctgggcgaaccgcaaatcctcggccaggtgaaaaaggccttcgccgaatcccaacgcggccagtcgctgtccggcgagctggagcgcctgttccagaaatccttctccgtcgccaagcgtgtgcgcaccgaaaccgaaatcggcgccagtgcggtctccgtggcgttcgccgcctgtacgctggcgcggcagatcttcgaatcgctggccgatctcaacgtcttgctggtgggcgccggtgaaaccatcgagctggtggcgcgccacctgcgcgaacacaaagtgcggcacatgatcatcgccaaccgcacccgcgagcgcgcgcagctgctggcggacgaagtcggcgcggaagtgatcaccctgccggaaatcgacgaacgcctggcggacgccgacatcattatcagttccaccgccagcccgctgccgatcatcggcaaggggatggtggagcgggcgctgaaagcgcgccgcaaccagccgatgctgctggtggatatcgccgtaccgcgcgatatcgaaccggaagtcggcaagctggccaacgcttatctgtacagcgtggacgatctgcacgccatcattcaaagcaacctggcgcagcgcaaagcggcggcggtgcaggcggagtcgatcgtgcagcaggaaagcaccaacttcatggcttggctgcgttcgcagggcgcggtggaaaccattcgcgactaccgctcgcaggccgaccagatccgcgcagagatggaggccaaagcgctggcctccatcgcgcagggcgccaacgtggagcaggttattcacgagctggcccataaactgaccaaccgtcttattcatgcccctaccaaatccctccagcaggccgccggcgacggtgacgtggagcggttgcagttattacgcgacagcctcgggctggatcagcattagttttctctattaacagggtttattaccacgcatgaagccttctattgttgccaaactggaagcgttacaagagcgccatgaagaagtgcaggcgctgctcggcgatgccggcgttatcgccgaccaagaccggttccgcgcgctgtcgcgagaatacgcgcagctgaccgacgtcagccgctgcttcctggaatggcgtcaggtgcaggaggatctggagacggcggaaatgatgctggacgatccggaaatgcgcgagatggcgcaggaagagctgaaacaggcgcgggcgagcagcgaagcgctggaacagcagctgcaggtgttgctgctgccgaaagatccggatgatgagcgcagctgtttcctcgaagtgcgcgccggcaccggcggcgatgaggcggcgatcttcgccggcgatctgttccgcatgtacagccgttacgccgaaggccgccgctggcgcgtcgaggtgatgagcgccaacgaaggcgaacacggcggcttcaaagaagtgatcgccaaagtttccggcgacggcgtgtacggccagctgaagtttgaatccggcggccaccgcgtgcagcgcgtgccggaaaccgaatcccaggggcgcatccacacctccgcctgcaccgtggcggtgatgccggaagtgccggaggccgaattgccggacatcaacccgggcgatctgaaaatcgacaccttccgctcctccggcgccggcggtcagcacgttaacaccaccgattcggcgatccgcatcacccacctgccgaccggcatcgtggtggagtgccaggacgaacgttcacagcacaaaaacaaagccaaggcgatgtcggtgctgggcgcgcgcattcgtgccgccgagatggccaagcgccagcaggccgaggcgtccactcgccgcaacctgctgggcagcggcgatcgttccgatcgcaaccgtacctacaacttcccgcaggggcgggtgaccgaccaccgcatcaacctgacgctttaccgcctggatgaagtgatggaaggcaaactggacatgctgatccagccgatcgtgcaggagtatcaggccgatcagctggctgcgctgtccgccgagcaagagtgatggattatcaacactggctgaaagccgccgccgcgcgtttgacccacagcgacagcgcccggcgtgacgcggaaatcctgttgggtttcgtgaccggcaaggccagaaccttcctgatggcgttcggggaaaccctgctgacgccgccgcagcaacagcagctggagacgctgctggcgcgccgcgaacgcggtgagccggtggcctatctggtgggtgagcgcgagttttggtcgctgtcgctgtcggtctcgcccgcaacgctgatcccgcgcccggataccgaatgcctggtggaactggcgctggcgcgcctgccgccgcaaccctgccacttcctcgatctcggcaccggcaccggcgccattgcgctggcgctggccagcgagcgcccggattgttcggctatcggcgtcgatgtgcagccggaggcggttgcgctggcgcagcacaatgcgcacaagctgaagatcgacaacgtccgatttttacagggcagctggtttgcgcccgtcgcggggcaacgtttcgcgctgatcgccagcaatccgccctatatcgacgccgccgatccgcatttgtcgcagggcgacgtgcgcttcgagcccggtagcgcgctggtcgccgccgagcacgggttggcggatctggccgccatcgtgcgccaggcgccgcactatctgcagccgcagggctggctgctgttggaacatggctggcagcagggtgagagcgtgcgcgcgctgctgcaggccgccggattttccgctgtcgccacccaccgtgattacggcgacaacgaccgcgtgacgctcggccaatggccgggataagcgccctcataataacgacgcccgagccatttaagggagcatcatgactgcatacaccgcgttgaaacatttccatttgctgacggtcgccatcagtattaccttgtttgtgctgcgtttcttttggcagtggcgccgttcgccgatcatggggcgccgctgggtcaagatagcgccgcacctgaatgacacgctgctgttcgtcagcggcatcgcgctggtggtgacgttcgggttttatccgctgctgggtatggactcatggctgaccgagaagctgtttggcgttattatctatatcctgcttggctacgtcgcattgggcaagaagaccaaaagtcagcggctgcgaaccgtggcgttcgtgctggcattgggctgcctgtacctgataattaaacttgccacgacgaaaataccgtttctgatgggatacctatgagtagcattgctgattttgaatttaacacctcgccgctgagcgaaggggtgatcctggtgtcgcagtcggtgcggcgcgatttcccggctgccgacgtggagcgcaagctgcaacaactggtggacgaagcgcgcgcggtggtgccggccgatatcactcaggagcagcaactggatgcgctcattgaactgttctacaagacctggggattcggcggcgccagcggcgtgtaccgcctgtcggacgccatctggctggacaaggtgctggaggggcggcagggcacgccggtttcgctcggcaccatcttcctgcacatcgccaacgcgctggatctgccgctgctgccggtgattttccccactcagctgatcctgcgcgccgattggctggatgaagagctgtggctgatcaacccgctgaacggcgaaaccctgagcgaacaccagctggaagtgtggattaagggcaacctgggcttgggtgccgagctggaagacgacgatctcgacgaatccgagaacatcatggtggtgcgcaagatgctggatacgttgaaggccgccctgatggaagaaaagcagctggaaatggcgctgcgcaccagcgaaacggtgctgtgcttcgatccggaagatccgtacgagatccgcgatcgcgggctgatttacgcccagctggagtgcaaccatatcgcgatttccgatctcaactattttgtcgagcagtgccctgaggacccggtcagcgaagtgatcaaagtgcagatccattcgattgagccgaaacaggtgacgctgcattaattcaatgactccgtgcagtttgcaaggcgacggttacaaccttaacaaaggcgaaagcatgaaacagaaagtggttagcattggcgacatcgacgtagcaaacgatctgccgtttgtgctgtttggcggtatgaacgtgctggaatcgcgcgacctggcgatgagcatctgcgagcactacgtcaccgtgacgcaaaaactgggcattccttacgtattcaaagcctctttcgacaaagccaaccgttcttccatccactcgtaccgcggtccgggcctggaagaagggatgaagatcttcgaagagctgaagaaaaccttcggcgtgaaaatcatcaccgacgttcacgaagcggcgcaggcgcagccggtttccgaagtggttgacgtgatccagctgccggccttcctggcgcgtcagaccgatctggtggaagcgatggcgaaaaccggcgcggtgatcaacgtcaagaagccgcagttcgtcagcccggggcagatgggcaatatcgtcgacaagttcaaagagggcggcaacgaccaggtgatcctgtgcgatcgcggcagcaactttggctatgacaacctggtggtcgacatgctgggcatcaacgtgatgaagaacgtgaccggcggccatccggtgatcttcgatgtgacccacgcgctgcagacccgcgatccgttcggcgccgcgtccggcggccgtcgcgctcaggtggccgagctggcgcgtgccggcatggcggttggcctggcagggctgttcctcgaggcgcacccggatccgaacaacgccaagtgcgacgggccgtctgcgctgccgttggacaagctggaaccgttcctggcgcagatgaaagccatcgacgacctggtgaagagcttcccggagctggataccagcaactaagcgctcatcgccaaaaaaaagcccgacgcgtcgggcttttttacgtttaggcgccggtggccgccagcgcttccggcagcgtcgggtagaactgcaagcggccctcgatcggctgcacccgcgcgcgcgccagggttttcagcggctggaacggcacgtcggtgatcaccagctttttatccgccggcagcgcgtcgataaagcgccgcagggcgctcaggccgccggcgtcgagcaccggcaccgcatcccactgcagcacgatcgtccggtaatcctcgctgcgcgccagcagttcgctaaagatgcgctcggcggcggcgaagaacagcgggccattcactcgcagcaccaggcggccatcgtcggcgctcagctcgctcagccgcgtcatgcgggcgatgcgacgcataaacagcagcgacgccaacacgatgcccacggtaatggcgatcaccatgtcgaacagcaccgtcagcgacatgcacagcagcagcaccagaatgtcgtccttcggcgcccggcgcagcaggtaaatcactttgtgcgcctcgctcatgttccaggcgaccatcaacagcagcgccgccatcgccgccagcggcagataagagagccacggcgccagaaccagcagcgccaacagcaccagcagcgcgtggatgatggcggaaaccggcgaggtggcgccggcgcgcacgttggcggccgatcgggcaatcgcagcggtcgcggtgatgccgccgaagaacggcgcgatgatgttgcccgcaccctggccgattaattcgctgttcgagttatgcttcttgccggtcatgccgtcgagcaccaccgcgcacagcagcgattcgatcgccccgagcatcgccatcgaaaacgccgccggcaacagggcggaaacggtttgccaactcagggtgaacggctgcccgccgccgcccggcagatcccagggcagcagcagctgtggcaggatcggcggaatgccctggccgctgctgccatcggccagcaggtagctgaagcgggagccgatggttgccactgggtggtcaaacagcgtcagcagccccatcagcgcagtgcccgccagcagcgccggcaggtggccgggcacccgcaggccgagcttgggccagaagatcaaaatcagcagcgtcacggcgccgatcagggtatcgccgatatccagcgtcggcagcgcctgcagcagggcgtacagcttgccgacgtaattttccggcgtgtgcgtcagctgcaggccgaagaagtccttgatctgcatggtggcgatggtgatggcgatgccggaggtaaagccgagcgtgaccggcagcggaatgtactcgatcagcctgccaaagcgtgcgagccccatcagcagcagaaataccccggagatcagcgtggcgaccagcagaccggccaggccgaactgctgcgagaccggatagaggatcaccacgaaggcggcggtggggccggagacgctgtagcgcgaaccgccgctgacggcgatgacgatgccggcgatggcggcggtatacagaccatactgcggcggcacgccgctggcgatcgccaacgccatcgccagcggaatggcgataataccgaccgtcaccccggcgatagcgtctttcagcaaccgcgccaggttataaggttcccgccagcaggcgtctatcagcgcgctgaaggggcgaattttgtttatttcatgcgttttcatctacggtgcgtaccaaatcttcaaaagtgaaaggaatggcgggcccgatgaggtccgtcttgtcacgtgacagataccatacgccttttgttcagcggattaccagacctgtatcaatttggcgcaggaaatcagagagtcgcccttttgttcggcgctaaatttcgataatagagaagtcagccgcagattctgcggctgaaaagaaaggtgacagtcaaggttttaacggttattgcagggcgggcagggataagccgagaaaatgggctaaagtgctcaccagcagctgatgatcttccttctgcggcgcgccggaaatgctgatgctgccgacgcagccgaggccggtcagggtgagcgggaaggcgccgccgtgcaccgaatagtcacgcacgctcagcccgtaacgctcctccagcgacgtttgccgctgctgcaggcgcaggccgatggcgtaagagcttttgtgaaaaaggttcaccagattgcgcttgcgccgcacccagtcggcaatgtccggcgttgcccccggcatggcgtaataaaacagcgtctgcccggccagttggatctcgatggcgatgctcaggccgcgccgctcggcggcggttttcagcgccgcgcccagttcccaggcggtggcggcgtcaaaatgggtaaaggccagcgtcgcttcctgttcgctgagcgcttgcagttcatcgtcgatattcatgcggttctcccccgataacacaacgcacagagtagcctgaagcgggcgtcgtgagatagacggcttggcgataagatagaactgctactctattaatagactgtgtaaaatggccgccgccgaagcggagacgacagggatgcgttattcaacgtctgcacattaccccctggcgatcccgaggagcgcgctgactatttatgacttacattgcgtccatttctaccctttacagcgacgcctgcatcacctacgccacgctgtcgataagctatttccttctcagcaagaatgcccctttttcttatcaatccgcactgtggaagcgggttgttttcggcctgctggccggggtggcggtgctgtatttgagccaggatcggctggagctgaccgataaggtgcattacagctttgcgatgatcccgatgatattggtgactttcttcggcggcggcgtcagcgggctggtgagttttctgttcgccatgacgctgaccggcggtttcaccgtcgataacctgttcatcgcctcgatcgtcgcgccgctgctgttgtcgcgcgtgtggctgaaaaaatcccaccggacgttttacctgacgatcggcatcatcgcgctgtatcgcatcgcggtggtgtggctgctggtggacatgagcgggctgtggccggatgtgttgctgtaccaggcggtttccgcgctctgtctggcgatttgctatcatgcgctgaatttcaaagagcgccatatctacgcctatttcgcgatgcgcgcgcgcgccaccaccgacagcctgacccacatcaacaaccgcgccagcgtcgattatcagctgatgctgcagcgtgccgagcgccgcccgtgcgggctgatgatcctcgatttggataacttcaaaagcatcaacgatacctacggccatccggccggtgacgtgctgctggccagcgtcggccggctgctgcaaaacagcgtgcgcaatgaggacttcgtcgggcgctacggtggcgaggagtttatggtgatcaccgccagctacgatccgcaggtcatcggcggggtggcggagcgcattcgcagcgcggttgaaagctcgacgttcttgctgaatgcgcacgacgaagcgcacatcacgctgtcgatcggcgtgtcgctgtatctgccgggcatgaggctggacaaggcgatcgccatgaccgacgaggccttgtatgaggcgaagcgcagcggcaaaaaccgggtggtgaccagccgcgtgatgcagctggcgccgctgggcgccggattcccgcgcgaataagccgcccccgccgccacggcgggggcattggctcagaccgccagcgtgtgttcgcggaaggcgttcagcagctcttcggtgaacgccaagcgtttttggcgatcggccagatcgagcgtgaacttcagcttgctcgggccgtccaggcggtaaacctgcggattgccctgcaacaggccgatcagataacccggatcgacgcggttgttgtcgccgaactcgataaagccgccgcgctcgttgctctcgatgcgtttgatccccagtttctgcgcgtgcaggcgcagcgccgcgcactgcaacagattgcgcgccgcatccggcagttgaccgaagcggtcgatcagctcgaccttcagctcgtcaagctcaccgtcgttcttcgcgctggcgatacgcttatacagcgacaggcgggtattgacgtcgggaatgaaatcttccggcagcagcgccggcatgcgcaactctacctcggtctggttgctggtgagatcttccagcgacggttcgcggccgtttttcaacgcgtcgacggcgctttccagcagctccatatagagcgagaagccgacggtggtcatctggccgctctggtcttcgcccagcagttcgccggcgccgcggatctccagatcgtgagtcgccaacgcgaaaccggcgccgagatcttccagcgacgcgatggcctcgagccgtttatgagcgtcggtgcccatggctttcgggtttggcgtcaacagataggcgtaagcctgatggtgcgaacgcccgacgcggccgcgcagttggtgcagctgcgccaggccgaagcgatcggcccgctcgatgatgatggtgttggcgctggggatatcgatgccggtttcgatgatggtcgtgcacaccagcacgttgaagcgctggtggtggaaatcgttcatcacccgttccagatcgcgttcgcgcatctgaccgtgaccgatggcgatgcgcgcctccggcaccagctcagccaggcgttgcgccgctttctcgatgttttccacgtcgttgtagaggtagtaaacctggccgccgcgcagcacttcgcgcaggatcgcctcgcgcaccaccagactgtcgtattcgcgcacgaaggtcttcaccgccagccggcgcgccggcggagtggcgatgatcgacagatcgcgcatgccgctcatcgccatgttcagcgtacgcgggatcggcgtggcggtcagcgtcaggatatcgacgtcggcgcgcatcgctttgatgcgctccttgtggcgcacgccaaagcggtgttcttcatcgacgatcagcagccccaaatccttccagcgcagatcgctctgcagcagtttgtgggtgccgatgatgatgtccactttgccatcggccgcgtcgtccagcacctgctgctgctctttggcgctgcggaagcgcgacatcatctcgatgcggatcggccaggtggcgaagcgatcgcggaagttgtcgaagtgctgctgtgccagcagggtggtcggcaccagcaccgccacctgcttgccgttttccaccgccaggaaggcggcgcgcatcgccacttcggttttgccgaagccgacgtcgccgcacaccaggcggtccatcgccagcggctggcacatgtcgctcagcaccgcgttgatcgcctgttcctgatccggcgtggtttcgaacgggaaggtctggcagaacagctggtattgttcgcggttatgcttgaaggcgaaaccggccttggcggcgcgctgggcgtaaatatccagcagctcggccgcgacgtcgcgcacccgttcggccgctttttgccgcgcgcgtgtccaggcgtcgccgcccagtttgtgcaacggagcgttttcatccgcgccgccggcgtagcggctgatcagatgcagcgaagacaccggtacgtacagcttgtcctcaccggcgtaggagaggatcaggtattcagccttgatgccgccggcttccagcgtggtcaggccgacatagcggccaacgccgtgctccaggtgcaccaccggctggccgggatgcagctccgccaggttgcggatcagggtatcggtgttgatggtgcgccggttgtcctgccggcggcggctgacgcgctcgccgagcagatcgctttcgcagatcagtgcacgctggcgcaggccgtcgaggaagccgtgttcggcggcgccgaccatcatgtaacggcccgcggtttccgcctgatcgagacgctggatcagcgccggcgccagcttgatgcggccgagcagatcctgcagcgtttcacgccgcccctcgctctcgacggagaaaatcacgctgccgacgaagccttcgataaaacgccgcagattatccagcggggatttatgctgcgcctgtaccgccagatcgggcagggcatggtaatccagattggtattgccggccttggccggcagctcatcggttttcagcgcgatgcgcggccaggctttcagctcgccgaacagcgcgtcaacgcgcagccacagcgtatccggcgccagcagcgggcgcatcggatcgacgcggcggctttcgtaacgctggttgacgtcctgccagaagcgctcggcggcgccctccagatcgccggtattgacgatcagcgtattggtcggcaggtagctgaacagcgacggcagcggctggctgaagaacagcggctgccagtattcgataccggcgggccaggcgcttttgctgacctgctgatagatgtgctcggcgtcgcgacgcacctcaaactgctcgcgccactggctgcggaacagctcgatggcgttcttgtcggtggggaactcgtgggccggcaacagattgatggcctcgacttcgctcagcgtgcgctgggtatcgacgtcgaagatgcgcaggctgtcgatttcgtcatcgaagaagtcgatgcggtaaggctcatcgctgcccatcgggtaaagatcgagcaatgcgccgcgggtggcgaattcgccgtgctccatcacctgatcgacgctgcggtaaccggcctgttccagctgcgcgcgcagcttatcgcgcgacaggcgctggcctttcttcatcaccagcgcgtggccgtgcaggaattcgtgcgggcagacgcgctgcatcagggtgttgaccggcagaatgatcacgccgcgcgccatggtcggcaggtgatacaggctcgacaaacgatccgagatgatttcctgatgcggcgagaagctgtcgtacggcagggtttcccagtcggacagtgtggtcaccatctgatcggtgaactgctggatctcgtcgcgcagccgcagggcgttttgcatatccggcgcgatcagcatcaccgggccagggtggcgctcgacgatctcggcgcactccacggcgcaggccgcgccggtcagttgccccagctggcgcagatcgcccgcgcgatcgggcagagaataacgaggggatgaagaacggttacggctatcggaagtgctcattcaggtatctttaatcaatgtgttagagggcgtcccggcacggataacccagtgcttttatgctgtttatagtagcccagcggccggcaaactgacacagcaaaaagcgctgcccatcgcttttttgccggttatttaaccggttaacgtcgtcgattttttgcagcgacgggtaaatcttgcgctaatctgccgccaccgctctcgtctgcgccacgcaataaaaggccgtcgggtgttccctaaacgagggagagcctttattatccatgatcactttgcttaagccacggctatcaaacggatttcatgtatcaacctgtcgcgttattcattggcctgcgctacatgcgcgggcgagcctcagaccgctttgggcggtttgtatcctggctttccaccatcggcattacgctgggggtgatggcgttggtcaccgtgctgtcggtgatgaacggtttcgaaaaggatctggagaacaacatcctcggcctgatgccgcaggcgctggtcaccagtccgcaaggatcggtcaacccgcagcagctgccggcctccgaggtgcagaagctgcagggcgtcacgcgcgttgcgccgctgaccaccggtgacgtggtgctgcaaagcgcccgcagcgtggcggtaggggtgatgctcggcgtgaatcccgacgaggccgacccgctgaccccgtatctggtcaacgtcaagcagcaacagctgcagccgggccaatacaacatcatcatcggcgaacagctggcggggcaacttggcgtcaagcgcggcgattcgctgcgcgtgatggtgccgagtgccagccagttcacgccgatgggccgcattcccagccagcgtttgttcactctcatcggcaccttccacgccaacagcgaggtggacggctatcagctgctggtcaaccaacaggatgcttcgcgcctgatgcgctacccggccggcaacatcaccggctggcgtctgttcctgcaacagccgctgacggtcgataccctcagccagcaggcgctgccggcgggcaccgtctggaaagactggcgcgatcgcaagggcgagctgttccaggcggtgcgtatggagaagaacatgatggggctgctgctcagcctgatcgtggcggtggcggcgtttaacatcattacctcgctcggcctgctggtgatggagaagcagggcgaggtcgccattctgcagactcaagggctgactcgccgccagatcatgtcggtatttatggtgcagggcgccagcgccggcatcatcggttcgctgctcggcacgctgctcggcgtgctgctggctaccaatctgaacaatctgatgccgatcctcggcgcattgatcgacggcgcttcgctgccggtggcggtcgatccgctgcaggtgacgattatcgccgtggtggcgatggcggtttccctgttgtccacgctctatccttcatggcgcgctgccgccgtacaacccgctgaggctttacgttatgagtaaccatcttttgctgcagtgtgacaacctgtgcaagacctatcaggaaggcaacctgcacaccgacgtgctgcgcaacgtcagctttgccatgcagcagggcgagatgatggcgatcgtcggcagctcgggttccggcaagagcaccctattgcacctgctgggcgggctggactcgccgacctccggcgaggtgatcttcaagggcgaatcgctgaacgccatgtcttcggcggccaaggccgagctgcgcaaccgccagctgggcttcatctatcagttccaccatctgttgccggacttcaccgcgctggaaaacgccgccatgccgctcttgatcggcggcgccaagccggctcaggcgcaggagaaggcgcgggagatgctggcggcggtcgggctggaaaaacgcagcaagcaccgcccgtccgagctctccggcggcgaacgtcagcgcgtggcgatcgcgcgcgcgttggtcaacaacccggcgttggtgctggcggacgaaccgaccggtaacctggataaacgcaccgcggacagcatcttcgatctgctgggcgagctgaacgtgcgccagggcaccgctttcctggtggtgacacacgatctgcagctggccaagcgcctgagccgccagctggaaatggccgacggccacctgcaggcgcagctgaccctgatgggggccgagtaatggcgggagcctcactgtccttcctgacggccctgcgtttcagccgcggccgtaaacgcggcggcatggtgtcgctgatctcggtcatctccaccatcggcattgcgctgggggtggcggtgctgatcgtcgggctgagcgcgatgaacggctttgagcgcgagctgaagaaccgcattctggcggtggtgccgcacggcgagcttgagccggtcaatcagccgttcagcggctggccgtcgattctgcagcgggtggaaaaggtgccgggtatcttggccgccgcgccgtacattaactttaccggcctgatggaaaacggcgcgcagctgcgcgcggtggaagtcaaaggcgtggatccgcagcaggagagccggctgagcgcgctgccgcagtatgtgcagggcgacgcctgggccaacttcaagcccggcgagcagcaggtgatcctcggcaagggcgtggccgacgcgctgggcgtcaagcagggcgcctatgtcacggtgatgatccccaacagcgacccggagatgaagctgctgcagccgaagcgcattcgcctgcatgtgaccggcattttgcagctcagcggccagctcgatcacagcctggcgctggtgccgctggccgacgcgcagcagtatctcgacatgggtgacagcgtcacgggtatcgcgctcaagatgaacgacgtgttcgccgccaacaaactggtgcgcgacgccggcgaagtgaccaattcttatatctacatcaaaagctggatcggcaagtacggttacatgtaccgcgatatccagatgatccgcgccatcatgtatctggcgatggtgctggtgatcggcgtggcctgcttcaacatcgtctccacgctggtgatggcggtgaaagacaaaagcgccgacatcgcagtgctgcgcaccctgggcgctaaagacggctttattcgcgccatcttcatctggtacgggctgttggccgggctgctgggcagcctgagtggcgtggtgatcggggtgatcgcttcgctgcagctgaccaacatcatccggggcatcgagaaactggtcggtcattccttcctgtcgggcgatatctacttcattgacttcctgccttccgagctgcactggctggacgtgctgatcgtgctggcgaccgccatcgtgctgagcctgttggccagttggtatccggcgaggcgcgccagccgcatcgatccggcgcgggtgctgagcggacaataacaccgacggggaggcagcgatgccgccccgtttttttagcctggggatgggttatgtactacggtttcgatatgggcggcaccaagattgagctgggggtgttcgacggcaacctgcagcgcatttggcaaaagcgggtgccgacgccgcgtgaagactaccggcaactgctggccacactgtgcgatctgacccttgaggcggatgcgttttgcggccggcgcggcagcgtcggcatcggcataccgggcctgcccaacgacgatgacggcacgttgtttaccgccaacgtgccggcggcgatggggcggccgctgccgcgcgatctggcggcgctgatcgggcgcgaggtgcgcgtcgataacgacgccaactgctttgcgctgtcggaagcctgggacgacgagttccgccgctacccgacggtgctgggcatcatcctcggcaccggcgtgggcggcggcctgatcgtcgatggcaagacggtgcctgggcgcaactatatcgccggcgagttcggccatttgcgcctgccggtggacgcgctcgaggtgctggggcgtgatgtgcctcgcgttgcctgcgggtgcggccatcagggttgcattgaaaattacatatcgggccgcggtttcgaatggatgtacgcccatttctatggccggcgcttgcctgccaccgagatcattgcgcattatcaggcgggcgagccgcaggcggtggctcacgtcgaccgctttatggacgtgctggcgatctgcctgggtaacctgctgacggtgctggatccgcatctggtggtgatcggcggcgggctgtcgaatttcgacgccatttaccaggcgttgccgcagcggctgccggcgcacttgctgcgggtggctcggctgccgcgcatcgagaaggcgcgctatggcgacgccggcggcgtgcgcggcgcagcgttcctcaatttggtaaacagggaaaagtaaggagagagttaatgcacactcgccatcggctgtgtcagtttcgcaagagtaagcatgtgctgcatcagcgctttcgttcacgcatttttcaccgtgacaccatggcggcggccgagctgaaaaagccgtttgtggtggtgttgaccggggccggcatttcggccgagtcgggcattcgcaccttccgcgccgcggatgggctgtgggaagagcaccgggtggaggacgtcgccacgccggaaggttttcagcgcgatccggcgctggtgcaggcgttttacaacgaacgccgccgccagctgcagacggaggagatcgccccgaacgccgcgcaccgcgcgttggcggatttggaagagtggttgggggacaacttcctgctggtcacgcaaaacattgataacctgcatgagcgcgccggcagcaagcgggtgctgcacatgcacggcgaactgctgaaggtgcgttgcacccagtcggggcaggtgttcgaatggcccggcgatctcagcgttgacgatcgttgccattgctgccagttcccggcgccgctgcggccgcacgtggtgtggttcggtgagatgccgctgggtatggacgacatctaccaggcgctgagcaaggccgatttcttcgtcgccatcggcacctccggccatgtctatccggcggccggcttcgtgcatgaggcgcggctgggcggcgcttacgcgatggagctgaacctggaaccgagccaggtagagagccagttcgacgagaaacactacggtctggccagcgaagtggtgccgcgttttgtgcacaagttcctggtgggcaaggtggcgcgggccgaccgcccctgagaaaggcatcagggcgcaatgcgcgccctgatgggatggtgggcgtattagcgcccggctttcagcttttggaagtagctttcgtacagcgtgctggcgtcgccgacgtcgttttgccactcgccgtgctcaatcaccgccttatccgggtagagagacttgtcgttggcaatctccggcgacagcagcttcttcgccgccaggttcggcgtcgggtaaccgatggtctccgccacctgcaccgcgatttccggccgcagcaggaagtcgatcagtttcagcgccccttcgacgttgcgcgcgttggccggaatggccaggctgtccatccagaagatcccgccttccttcggccagacgatctccagcggcgtgccggcctggcgcgccacaaaggccgaaccgttccacaccatgccgacgttgacttccccttccataaacgggttgcccgggttgtcggagttgaaggccagcacgttcggcatcaatttctgcagttcgtggtaggcggcttcgatctctttcgggtcagtggtgttgccggaatagcccagcttgagcagcgccatctggaacacttcacgcgcgtcgtcggtcagcagcaggcggcctttgtactgcggttgccacagatcggcccaggaggtgacggtggacggatcctgcgcgtcgctgttgacgccgatggcggtggcaccccagatgtaaggaatggagtagtcgttgttgggatcgaacggcttgttcagcagggtgggatcgagatccttgaagtggctgagcttgctcttgtcgattttttgcagcatgccttccttgctcatcttggcgatgaagtaggtggagggcaccactagatcgtacgcgccgtctttgtaggtcttcagcttggcgtacatgctttcgttggattcataggtggaatagatcaccttgatgccggtttctttggtgaactgctccagcagccccggcgggacgtattcagtccagttatagaaatacagcgttttgccgtcagaggcgtttgcagagcagaaactcagcgccatcatcccggctgcgagcagatgtgaccactttttcatgcagcgtatccttcagcagtagtgagccgaacccgtatgggccgccgttttcggccgcgccataccccagaaaggggccattataggggccggggcggggtgggtaaaggcggttatcccactggcaaatcaaggggttcagcgccttaaagcgcatcacaatttgtgtgtctcgcgctggacaggcggtgaagcgcgtgcgaaacaataattttggcgaataaacgagggcagcgatgaatttcaaacaggtcttcagccagactgagctcagcaagacggatctgacgattttgcactgcattctcgacaacccggacgcctgcatcgacgacggcatccgtgcggtgtccgcacgctgctacagttccccctcgacgctggtgcggctggctaaaaagctgggctttcgcggctatctcgaactggtctatttcatcaagttcaacctgacgatggcgccggcctaccaggcggaacgcgctacgtcggcggcaccgccggcccagcaggcgcagtttctcgatctgctcgacaacggcaagatcctgatccacggtagcggtttttcgcagctggtggctcaatatatgtacaacaagtttatgacgctgggtgtagacagttatctgtcgctgtggccggatttcgacattcttgaccgtgagacgcgctttcgcttcgacatggtgatcgtgatttcaaagtcgggcaacagcggctcggcgctgagctggggcgaagcggtgaaacgtaaccgcattctgctggcggccttctgcggcgacggcgacagcccgctggcgcagcaggccgacatgacctttctgtttgaggaccggcaaaaatacgatcacgatatctactatcccaacccgtttttcggccactgtctgttgggattcgagaatgtgatcaccgcctggtttgaacgacgcggccgctgacggccgcgtcgtttagcgccagtgcccggcatacgcgcggtgggcctgcaggtactcctccaccagcgttttcgccagcgagtaggagttgaccagcgggtgcaccatcagtgctttgatggccagttggcggttgccggtcaggatcgccgccaccgccagccgttcgtactctttcacctgcgaaatcaggtttttctgggtgtcgggaatatcgcgcattttgaccggctgaatgccggcgctgctcaattcgcagctgatttcgatcacgtcatccgggtgcagaaaatcgagcgtgtcgcggttttgcatcgacaccaccacgcgtttttgccggccgctgttgaccgcctccagaatgtcgatcgccaccccggcatagccgccgctgtccggctgctcgataaactgttgcagcgtcagcatctcgcgcgttttcaccttgccctggttggactcgcgctgcatgtaggagttttcgcgctgcagataatggctgaaatagacagagaaggcgtgttccaactggtgggggatgtccagcacgcctaactctgacagcatttggcggttgatcgccgcgatttgttcgccgcgggtctcgccgcccgcgacgatggcggcgatcgcctgctcacgatagtagtaataatagagatactcgttgagcatcaaattgtccgacagcgccaccaactccggcgagaagtatttcatgcaggtatcacgatacaggcgcggatccgccagcaaccgctccgtgaccggttcgccgttgacgcgcgcattgcggaaccaggaaagatggttgaggccgaagcagtcgacgctcagttggtcttcgcggcagcccagcagctcggccagttcgcggataaactcgctgggggcgtcgcagatgccgtagacccggcgctggaagccggatttgatgatcgcctcggtcaccatgccggaaggattggtgaagttgaacaggaccgcgtccggtgaggaaacctgttcgatcaggcggcaatagtcgaggatcgccggaatcgaacgcatcgccatggcgaagccgccggcgccggtggtttcttgcccgagcaactggtgattgagtgcgatgcgctcgtcatggatgcggccttcctcgccgccgatgcgcagggtggtgatgatgtagtcggcgccttgcagcgcctgacgcggatcgctgctgaggctgaaagcaatgtcgccgcgaatgcgctggaatacgccctgcgcgagggcgccgtagatcgccagatggcgctcatcggtatccataaacaccacttcggtaatgccgatgcgatgggcgttataggcgatggatttggcgaggaacggggaacgcacgccgccgccgccgagaacggttaacttcattcgatatctcccattaataaagcgttagagtgtcgctaaatatttttctacctgatttttgaccttgccgaccgtgacgccgtaaattacctgcacttcacggcgattcttcactacgcctttggcgccggtgctttttaacgcggcttcatccacccgcgtcatatcctttaattccacccgcagtcgggtaaaacagttatcgacggaaataatgttttccttgccgcccagcgcgcgaataatgatgccgctcggctcgtccggggtatttttgcggttccggtaatcctgtttggaataaagtctgacgtcctgatcatcttcacgacccggcgtcttcagattgagcttcagcaccagcgttttgaacaccaggtaatacaccgcaaactgcaccaggccgatgaccacgtacagtggccagcgggtgagggaaaccggcagcggcaggttataggccaggaactcgaccagcccgctggcgccccaggggcgcacctggaacaggttgcagaccacctgcgacagcgcggtcaacacggcgtggatcacccacagcagcggagagataaacaggaaggtgaactctatcggctcggtgatgccgaccaggatcgaggtggtgatggccgggattagaatcgccttggccagcattttcttttccggcttggcggtgtgatagaaagccaatgccgcgcccgacaggccgaagatggtcaccatcccttgctgcgagaagcgcagcgcttcgttcatcagcggcgagatgctcgggtcgcgcatataggccaggaaaatcgcctgcgagccggagacggtctggccgtcctgcacgatcgaaccgccgatgctggtaagctggaacggcgaccagataaagtggtgcagcccggtggggatcaggaatttctcaaagaagccgtagacgaataccccgagcgagccggcgcttttcataaagccggtcagcgcgatcaggccctgtgagatcgccggccacaggtagctgaaggcgacggcgtacagcatgatgatcggcgtcatggcaatcagcaccagcttggcgccgccgtagaccgagaacacgccgttgagttcgacgttgcacaggcggttatgcacccaggcgatggtgacgccgaggataagaccgaggaaaatgcccatatccaccacggtaaaacccagcaactccgtctgcccggtgccgtaatattcgccgttgatcttggccgcgacatggccgctgaattgcagataagaggcgttggcgccgaggaacatgataaagcacatcacggcgaccagcgccgcttcgcttttcttgtctttggccagaccgtaggtaatgccgatgcagaaaatcagcccgaggttgccgaataatggccagaaggtatcgccgatcattttaccgatagagaagacggcggaatgttcattgattaatgtggcattggtgagaatagaactgagcgccaggatcagaccgattaccggcaggaaaaatatcggccccatcatggctttggagaaaagctgcagcttgcttaagatattatcgataatacctttcatggcagttcctttttatattttaatggatgacgacgttgctgaataaactccctggaagcgagaaaaaaataaggcaccttgcctgagttcagttatagggggaagttttcgccgctgcaatcggcggggcggaaataggcaccgatggtcagggagtgacaaccggtgccggttgtgaaggggatcacaaccgggcgccgcagcgcccggcgggatgggttactcggccttgggcgagcgatcgcgcatcacccactggctggcgatcaccagcaccagcgacagcagcagcaaaatggtggccagcgcgttgacctccggtgagacgccgactttcaccatcgagtagatcttcagcggcaagatctcgtagctcggcccggtgacgaaggaggagaccaccacgtcgtccatcgacagggtgaagctcagcaaccagccggccgctaccgccggcaatgccaacggcaggatgatcttgcgcagaatggtgaactcgcttgcgccgagatcgcgcgcggcttccagcatcttcacgtcgaagcctttcaggcgcgcgtagacggtcaccaccacgaacggcaggcagaaggtgatgtgcgagaacagcaacgaccagaagccgagcgaaatgcccagcagcatgaacagcaacagcagcgagatggccatcacgatgtccggcgacatcatcaccacgaacagcatgccgccgacaaacggtttgccgcggaagcggtagcggtacagcgccaccgcggtcagcgagccgatcagcgtggcgaaggtggcggagagcaccgccatggtcagcgagtggcccgcggcctgcagcaggctgtcgttattcagcagggtgctgtaccacttggtggtaaacccttgccaattgatgccgaagcgcgaggcgttgaaggagttgacgatcaggatgacgatcgggatatacagataggcgtataccagcgtcataaagccgccgcgcagcagacgtccgatcatgccagatcctccttcttgttcagcaggcgtgcggcccggtaataaaccagcagcaacagccccatcaccagcgtcaggcagatgctggtggccgcgccgaacggccagtcgcggatattgaggaactggcttttaatcacgttgccgatcagcaggtttttggcgccgcccatcagatcggcgacgaagaacagccccatcgccggcagcaccaccagcaggcagccggcgataatgcccggcatggtcagcggcacgatgatgcggataaaggtttgcagcttgctggcaccgagatcgcgcgccgcctccaggcaggacttatcgagcttttcgatgctggagtagagcggcatcaccataaacggcaacaggatatacaccaggccgaggacgaccgcttccgaggtgtacatgatgcgcagcggcttgtcgatgacgccgatccacagcagcacgtcgttgagatagccgcgggtgctgagaaacagcttcaggccgtagatgcggatcagcgagttggtccagaagggcacgatcagcagaaacagcagcagcggccgcaccttctgcggcaaccgcgccaggataaaggcgaacggatagccgatcgccaggcagcacagggtggcgatcagcgccatgttcagcgagtgcagcagcacctgggcgtacaacggatcgaacaagcgccggtagttgtccagcgtgaacaccatctgcaccaggttggcgtcgtcgcgggtcaggaagctggcgccgatgatcatcaggttcggcatgaacacgaacagcaacagccaggcgacgacgccgacgatcaccacattctggaagactttacgcgatttcttcatcggccagcaccacctcccagctttcaacccaggttaccgccatcttctgattgagcgagtgatcgacgtccggatcgtcttcgttgaagaactcgctgaccatcaccattttgccgctctccagctcgaccaccgattccagcgtcatgcctttgtagttgcgctcgcgcacgtagccgatcagcccgtcgtgctgcgcgctgtcgttcacttcttccacccgcagatcctccgggcgcagcagcaccttcagcttttggcccggttccaccggcagatcggcgtagatgtcgcactcgcggccctcgacgttggcgcgcacccgctgcggatcgaggcgttgcaggaccaccgcgtcgaaaatgttgatctcgccgatgaagctggcgacgaacaggttcttcggctcttcgtagatctcacgcggcgtgccgtcctgctcaatgcggccttcgcgcatcaccacgatgcgatccgacatggtgagcgcttcttcctgatcgtgggtgacgaacacgaaggtgatgcccagtttgcgctgcagcgctttcagttcgttctgcatctgcttgcgcagcttgtagtccagcgccgacagcgattcgtccagcagcagcaccttcggcttgttgaccaccgcgcgggcgatggccacgcgctgctgttggccgccggagagctggcccggccgccgcttggcaaagtcgtccagctgcaccatgcgcagcgcctcttcgacgcgcggcgtcagttccgccgccggcaccttttgcatgcgcaggccgaaggcgacgttgtcgaacaccgacatgtgcggaaacagagcgtagctttgaaacacggtgttgacgtggcgatgttcggccggaatggcggtgatgtcctggccgtcgagcacgatgcggcccacatcggcgtcttccagaccggcgatcaggcgcagcaccgtggttttgccacagccggaggggccgagaatggtgaggaattcgccgtggttaatcgtcagatccagatcggcaatgatggttttgccatcgaacgctttgctcagggcatgcagttcaacaaggggagtcggagaggatgtctcagtcatttatcgtattactctatcccgtgggctaatgcagatagaaccgcaactggaaaagactgccggagcttgcgggatacccgctgatcaaatgaagctcaaaccagttacgccaatggaaatttttcgagcgcgcatgatagacgctgaatgccggaattgaaagccgatccggcccagatgccgcgtttttcatcatgatagcgacaaatgaccctgtgatgacagcattattcccctcagaaatcatcacaaagattaatgatattggcgaattctggttaaaaatgacctgacgcaatatttgatcctgatcggttccgcataatgaaacgcgatattctgaggggccgctaccatggacaaattacttgaccgctttttcaactacgtctctttcgacacccagtccaaagcgaacgtaaagcatgtgccgagcaccgacgggcagttgaagctggcgcgtgcattgcagcaggaaatgatcgcgctcggcttcgagcgggtgtcgctcagcgaacacggctgcgtgatgggcacctggccgggtaacgtcgcctggccggtgccggcggtcggtttcatcgcccatctggatacttcgccggatttcagcggtaaacacgtcaatccgcagatcgtcgagaactatcgcggcggcgacattgcgctcggcatcggtgatgaagtgctgtcgccggtgatgttcccgatcctgcaccagatgctggggcagacgctgatcaccaccgacggcaaaacgctgctgggcgccgacgacaaggcgggcatcgccgagatcctcaccgccatggtgcgcctgcgcgcgcgcaagatcccgcacggcgacatccgcgtggccttcactccggacgaggaggtgggcaagggggcgcagctgttcgacgtggcggccttcaatgcggaatgggcctacacggtggacggcggcggcgtcggcgagctggagtgcgaaaacttcaacgccgcctcggtgacgatcaaaatcctcggcaacagcgtacaccccggcagcgccaagggagtgatggtcaacgcgctgtcgctggcgacccgcattcatctggcgctgccggcggacgaagcgccggagaccaccgaaggctaccagggcttttatcatctcagcagcatcaagggcagcgtggagcgcgccgaaatgcactacattctgcgcgacttcgagcgcgaagggttcgaggcgcgcaagcgtaagatggtggacatcgctcgcgagatcggcaaaggcctgccgcgcgattgctatatcgaagtcagcatcgaagacagctattacaacatgcgcgaacaggtggcggagcacccgcacgtgatcgcgctggcgcagcaggcgatgcgcgattgcgacatcgaaccggtgatgaagccgatccgcggcggcaccgacggcgcgcagctgtcgttccgcggcctgccgtgcccgaacctgttcaccggcggctacaactaccacggcaagcacgagttcgtgacgctggaaggcatggagcaagcggtggcggtgatcatgcgcatcgcggcgctggccgccgagcgggcgcggtaaacactttcgttccccggccggctagtgccggcccgactatgcttttctgatccgcccggcggggcccagcgcgcccgccgttatcttcttcttctgttctctttatggttcccagtctcatggttgtttcgttcaccacacaacccgcggtgagggaatcccattatccttcgagataaaatgctgtttatgcatacagtgtggctgtgtgcttaaccggttttacagcttcggtgcggtgagcccagtcgccaggggatgctgggggaatgagcgttgttaaccgccatcaaacaggacgtaagagggtaacaatcatggcagaagaaaagaaaaatgctcaggtgattaacggcgttaacgacgatattaccgaactgaaatcgctgtctacgctgcgccagcgcgtggtcagcgacggtgaaatcgtctccaaatcggccaatggttttcggctggcaaatggcaataccggcgtgatgctgcgtaatgatggccgcgatttttacgcgctggcgacgccgggcggccaagcgcttaacgggcagtggaacaccttgcgcccgttctcattcaatttggcgtctggccgggttgcgatgcgcaatggagtggatatttccggcggtgcggtggtgtcgcacaacgcgggtatctacacctcgaccaccggcccgactccgcttatcaatggtcaggtttatgatgcggctgccatgcatactaattttaccagcggcaacgtcactacggtgatgttaatgggctcgcggattgtcgctggtaaagaaaattatggattgctctcttatcgagactggcagggtaactggaacgaactgcaggtaaggcccaacgccgagctttctgtagggcaattgactaaacgcaaccccgatggatggatttgggctgctgggaaccgtagtgttgacaatgataagggacgtattaccaatggattgcatttgcaggggcgatacgacctgtatgccaacctttatcatcatgaatttgtcggctctcaccattcgctggtgctgaatgtcgccaacggtggtgggcaaggctggtacgaattccgtaatgatggtaacgcctacaccaacggcgcctggcacagcagctccgatgcccgcatgaaaacggacatcacccaaattgccggtgcattggacaagctggccaatattggcggctacacctacctcaaacagggcgtgccggaggccggggtgatcgctcaggaagtggagagcgtattgccgcagtcggtcacccaaaccgaattgaaacttaatgacggcagcgtgctgaaagatgcgcggggcatcaatatcaacggcgtggtggcgttgctggttgaagcgcttaaggaagagcgagcggcccgagaaacgctggaatcgcggttggcagcgttggaaaaagcgattacgtgcgcctgagtaataacaatttttgtgggtagcgcagagtattaaccgatagtgctgctggcgataagcacttaagaatttactctgctgccacatcaacgaaataaaaggactggcatatgagtggcggagatggaaaagacagccgtggcccaactggtggaattaaagggggggcttcagaccagggacccaatgtagggcacggtggatctatggatataaatattcctggcatgggggatgtgcatatcgatggagtacatggtttaaatcccggtaaagataacagtaccaactgggatgatggtaaagggaacggtaatggcggcagggacagtagcagcagtggagattcccagggggcagcgatacggcggcaggttaacgctatcaaaaatgaccctaaagttaataatatactgaaagatttacaaaaaaaggtacgtgcggttacaacttatgcaaaggtagctttgaaaagtgttgaggctgacggaaaaatacaggtgcaggttggtgaaattcgtacaaccgatgaggccgccgtcagcaaggctattacctctgtctcacaagttaaaaatgtacttggcgtggggttgcctgctcaaggcgggatcgtgttcgccggtaatatcgatacccatcatagaatcggtaattatcagaacatacccaacggcaacaataacggcaacaattctgccgcagaggataaggcgtcattagccacctattccgaggtgcttaatggaaaaatcccaccgggtttctggcttgataataatagggtgatgactgaaattacggagcaatatgaaatcaacggcggcggcaaagggagcgatcgcacaggttaccggcaacgtaatgtcgaagtgccttctttgacatcggcctatcaacaatttaagcaggtagaacgagaagtggccgaagaggcccgtaaagctgaagaggcccgtaaagctgaagaggcccgaaaggcggaagaggctcgcagagccgaagaagctcgtaaagctgaggaggctcgcaaagccgaggaagcccgaaaggcggaagaggcacgcaaggtagaagcagccagaaaaacgttattcgccaaagcggggattttggatgctccggcgtatacgccggaaaagctaaaagcggccaatgcggcgctggcggcagcaggtgccatggtgctcaaccgtgcgcccgcgatgctgcagacgtcggtaatcgggaaaggcgtgatgacgaccacgagcgaactggccggctgggcagcgagcgcgtcgtggcgggcagcctacgaaattggcagtatacgcgccggcaatgtggtcgctgccggatcggtgctgggggcttttgcccttggtttctacccgtcggaggtcggtgcagggagcgaccgggtacccgggcgggatgtcaatttgtttgccctccaggcgagcctggcggcagcgggccgggcgaccatccagcccggcatgacctcggtcgatttgccggtgcgcgggtttatcaccaccgacgacgacgggagacagagcgtcaacttcgtcaggacaggcgtcggcggcgtatcgccgagtgtgccggtattcagacccgttcgcgatgagctgacaggactggacaaaatcacgctgcccgcaatggcgggggtaccggcgaggacgatactgatcaacccggtgccgaccgggccggccgcgccggcgcataccggcaacggctcaccgggacctaaatcgccagtgcataccggcaccggcatcaggcaggcggacagcatcgtggtcaccaccttcccggcggatgtggtgcaggatctgcaagactttatcctgtggcagccggatgcgacggagtttggtgtagaggccatctatgtgatggtgagcaagccctatggtgaaaccaacgccaggggcaaatacagcggtcgtgaatacaacaccaataaagctgggggccccattcagaatctggattggaaaggggccagcatcgaccgtgccggcgtggataaggtgaagctgcatactgggcgttttgaacagaccccggaaaaccaagtgatgattgaccgtttggataaaattttgaagggggatctacaacctactgacactgataggcgattttatactcatgaaatcagagagttggaaaggtacaggaatcttggtataaaagatggtgaggttccgcacagtgttcaagaacagaaggccgtatggaataatactcatactgctacgcttgaagactatagaataaatgaaaaggaacaggcgctttatacagatggggccctacaagccgcatatgaacaggaactgaaagatgctatgggagggaagaaataatgcctttaaaagatatcgttaaaaatgaaagtgtagaagatgtgctaacttttttggggccgacctctgattaccgtaaattggatcggctatatacctataatcgctttgatgcaatttccagcggggagctctcttctacttacgatgcattattccaaaaaggggtgcttcaagatcaaaatggaaaagtagtgaaaggccccaattggaaagagccgaaatttgtaaccgagaaaaaatacggtatcgaatagctatagttatgctctgattagtgcatttttaacccccagcaaacgaaattttgttgggggttttcttttggtgatgtaccgggcagaacgaaactaataaacctagtaccgatcgggtcggcaccggtattaggcagccggacagcatcgtggtcaccaccttcccggcggatgtggtgcaggatctgcaagattttatcctgtggcagccggatgcgacggagattggtgtagaggccacctatgtgatggtgcgcagtccgagatatactccgggtaaagtgagcggcaaaggacagcaagtgggagacggctggttgaatacagcggggcagttcccagccagattgcggataaactgcatgggcgagagtttgcgagctttgacgcgtttcgtaaggcgttttggactgaggtggggaaagatcctgagctgagcaaacaattcaagtcggggaacttcggcgatatccaaacaggtaaagcacctgcgcctagagaaacggagcaggtgggggacgtgttaaatatgaattgcaccacgtaaaaccgatcaaagataacggtgaggcttatgatgttgataatatcagcataactactccaaagcgccacattgaaattcatagagggagttaatgagatggaaaagaaaacaatatctgattatacggaagcggagtttttaaacttcgtgaaaaaaatttttgatgtgcaaaatacgacggaagaggaggatataaggaatattctcgagtttaaacggctgtgtgagcatccttcaggatccgatcttatctattacccagatgaaaacagggaggatagccctgaaggtgtcgtaaaagaagtcaaagagtggcgtttcaagaacgggaaaccaggcttcaaacaagggtaaccgtgtctaatcgtcttatgatgatcaaacggtaatgagcacttcagaagcgcccagcaaactagcgtttgttgggctttttttggtatttcaatcaactaacctagctatcagaaggtgttacgaaactcgagttaaactccatgacaacaagtggggacggctggttgaataaacctggctggctcctagccaaatcgccagtgcataccggtaccagcatcaggcaggcggacagcatcgtggtcaccaccttcccggcggatgtggtgcaggatctgcaagactttatcctgtggcagccggatgcgctggaaaccggggttgaagctgtctatgtgatggtcagtgatccgctggactcggggcgttttacgcgtcagcaactggataaaaagtacaagcacgcgagtgattttggtgttgcggacaccagaaagaacagagagactctgactcaatatcgcgatgcgctcgaggcccatttgaaggataaggatacggtagagaaagggacttatagacgagaaaaaggatctaaggtgtttttcaatcctaacacaatgaacgttgttgttttaaaagaaaacggcgatttcttatcagggtggaagataaatccagacgcagataacggtaggatatatttagatacgggggatttatgaatcggatggcaattattgatctggctaagagttttctaagtaaagaggtcggggcattggagttctccgaaaaaatatgtgtagaaagacgtatgctctatggagttaaggatcaggatagagacgttatgaattgtggggaagagctatttatgatagctgaagtttacaatcctgattcagaacgtgctgattatgaacttgatgatgccggattgcgtgccgcagttataacggcactggaaaaattcaattttatctgaacacattattagaatgggtgctctcgtagatttgaacttatctgagtattagggacggtagaaagaaccgcctacatagtgacagaatagttaacaaaagtgacccttacgcccaatagacgagagtctattgggcattttctttttttcacggtgataaggaggtgaagagctaatttaatgccggttgctcggttgcccagcaaggtccagcatcaggctggcggacagtatcgtggtcaccaccttcccggcggatgtggtgcaggatctgcaagactttatcctgtggcagccggatgcgacggagtttggtgtagaggccatctatgtgatggtgaacaagccctatggtgaaaccaacgccaggggcaaatacagcggtcgtgaatacaacaccaataaagctgggggccccattcagaatctggattggaaaggggccagcatcgaccgtgccggcgtggataaggtgaagctgcatactgggcgttttacagagtcagacgctaacaaagtgatgatcggccgcctggaaaaaatcttgaagggagaactgcctcccaccgatactgacaggcgattttatacacatgagatcagggaattggagcgttatcgcaatttgggtattagagatggatcggtgccagataatcaaggggaagtgtggaataatacgcatactgcgacgttggaagattatcaattaggcaacagcgaggctttgctctatacgcaggaggctttagacgctgctgaacaacaagagttgaggatgctaaaatgattgatttagaacgcttggcaaaagaagaaaaaatttctgacgtcattgcctttttggtgagaaatgaggatgggtttggttatccccaaatggatcgattctttagtcgccataattttacagtaattgggaatggtgaattcagacgggtgttcgaacagttacgtcagaatggcgttattgaatggggtgacaaaatgcttgttaaaaaaggccccaactggaaagagccgaaatttgtaaccgagaaaaaatacggtatcgaatagccatagttatggtctgattagtgcatctttaacccccagcaaacgaaattttgttgggggttttcttttttggctggtgggggcgccataacctgagccttgtgccgggtggctaaagtagcggcgcccgctcttttcgtcgcttgggctaacgtgcggataccatagttaaaacgggacgcttgcgattatcataatcgcttgccgcaacaaggcgttgctcatagtgttgaagcctattccccacgcataaggaccgcatgatgagcaccgaatatcgcatcgccagcccgcatttggcgcagttcgttcaggcgatttggcgccaggccggcagcacggcgcgcgaagccgagctggtggccgatcacctggtgcaggccaatctggccgggcacgactcgcacggcgtcggcatgatccccagctacatggcgtcgttggcgcaggggcaattgcagctcaatcagcatgccgaggtggtgcgcgacgccggcgcggtgctgacgctcgacggcgcgcgcggcttcggccaggtggtggccagcgaagcgatggcgctgggcattgaacgcgccggcaagctgggcctggcggcggtggcgctgcacaacgcgcaccatatcggccgcatcggccattgggcggagcagtgcgcccgcgccggttttatctcgattcacttcgtcaacgtggtgggcgatccgatggtggcgccgttcggcggcagcgatcgccgcttcggcaccaacccgttctgcgccattttcccgcggccgggccgcacgccgctgctgttggatttcgccaccagcggcatcgccttcggcaagactcgggtggcctataacaaaggcttgtcggtggcggcgggctatctgatcgacgaacacgggcaacccaccaccgaaccgaaggtgatgcatgaagcgccgttcgggtcattgttgccgttcggtttgcacaaaggctatgcgctggcggcgatgtgcgagatcctcggcggcgcgctctccggcggccgcaccacccacgacgccacgctgaaagccgacagcgacgccatcttcaactgcatgacgaccctgatcctcgatcctcaggccttcgacgccccgcaaatgcaggccgaggccgaagcgttcatcggctgggtgaaggcgtcgccgccgagcggcgaacagccgatcgcggtgccgggagaatgggaagaggccaaccgcgcggcgcggctggagcagggcataccgatagacgccaatacctggcggcagatttgcgcggcggcggagcaggcgggcatggcgaatgaagcgctggccggttttcgcgcgcaggcgcggcaagcataaaaaaagccacccgatagggtggcttgttcgcgtactcgtaatcagtcgttaaagtaccaatagccgctgttgaccagcgcggtcagcagcgccaggaacgacggatcgtccaccgcgtcgccgagcagggcggcatcgacgctgaagtgctggcacagggcgtctgcggcctgcaactggtcggtgtcgatcagttcaccgttgacgaagcagcgatcgccgatgcgcagcacgcgcaatccgcccaggcgctgcagcgcttcaccctgttgcagcagttcgtagatttccccggcctgatacggcggctccggcggcgccagatccagctcgtggcgcgattgggagataaactcgccgaaccagtgctggaagtgttccggctgttgcaccagatccagcatcatctgccgtaaggcgtccacttcctgcggcaggatctccgccgggtgttcgcgcagtttaacgtccggatcgccgtagcgcttgctgccgagctcgcgcgccagcacgtagtcggcgaagccgctcaccagctcgcggccgttcggcgcgcggaagcccaccgagtagttgagcgcgttttccagcgcgtagccttcatgcgggaagcccggcggaatatagagaatgtcgcccggctccatctcttcgtcgatgatggcgtcgaacggttcgacctgcagcagatccgggtgcgggcagtgctgtttcagcggcgttttttccccgacgcgccagcggcggcggccagtgccctgaatgatgaacacgtcgtactgatcgaggtgcgggccgacgccgccgcccggcaccgagaaggagatcatcaggtcatccatccgccagtccggcagttggcggaacgggcgcatcagcgcggcggaaggctcatgccagtggtccactgcctgcaccagcagcgaccagttgttttcgctcaggtggtcgaagctctcgaaggggccgtgcgcaacctgccaacggccgtcctggtggctgaccaggcggctgtccacttcgttttccatcgccagcccggccagctcatccggggagatcggatcgataaagtttttgaagccgcgcttcagaatcaccggacgcttttgccaataacgttgcaaaaaatcgttccagtccagatctaattgataatccatgttctattccaggataggggagtgagcctgagtgcgattataacggaagtttggccccgtggatcggggccgcagcggcataatttactcgttgtggtgggtgtcgtgctggcgggcgaaggtgacctgcatgcgcgcgccgccgagcgggctgtcgctgatgacgatttcgccgtcgtattgctcgatgatctccgccgccaccgacaggccaaggccctggccggggcgcagggtatccacccgctggccgcgctggaaaatcagctggcgcttgctttccgggatgcccgggccgtcgtcgtcgataacgatggtgaggtttttctcggagtgcagcgaggtgatctccacgaactccaggcagtatttgcaggcgttttccaacacgttgcccatcacttccataaaatcgttcttctcgcccataaaggtcacttccggcgagatgtccagcgtgatcaccacccctttgcgctggtaaaccttgttcagcgccaccaccaggctgtcgagcagcgccggcaccgagtggatctcgcgcgtcaacaccgtctggccggagttgatgctggcccggtgcaggtagtaaccgatctgctgcgagatgcgcccgatctgatccagcatgatcggctcggcttcttcgatggtggtttgcttgccgctgcgcagcgagcgtagggtgctttgcagcaccgccagcggcgttttcaggctgtgggtcagatccgacagggtggtgcgatatttggtgtagcgctggcgctcgttgcgcaccagaatgttcagattgcgcaccagcccgcgcagctcgctgggtggattttcgtcgagctgatcgcgctcgccgttctccagctcgcccacctgattgaccagcgccttgatcggccgcaggctccagtaggccgccagccacagcagcggcaccaccagcagcaggttggccaacagcacgtagctgaaccactcccacaccacgtcggagcgctgcagctcctgcggaatgctgtcgaccaccacgatggtcagcgccggcaggcgaggcgtggcggcataggtgttgaccgccaccgagtgggtcagcgcgttctgatcggtatcgtcgtaattcttcagctgatcctgcgctttggggttgtcccccagcacttcgctactgacgcgggtgtcggtgtcgatttcgtagaagccggactcctccagccattccttgttgatcagcttctcgagctccggcaccttgcgctggctccacagcaggttgcctttatcgtcgtagataaataccagcgtcgggaagttgagatcgagatcggggggaatggcgatggtgagcttgttgtctttccactgcgccaggctgaagaacaggttgctctcgccgcgcagcaaacggaaggcggttttgtcgaagctgacgatatagccgacgaccgccaccaaaccgtaagagagcgacagcgccaggatcaccccggcggtcgccatcaggaagcgggcacgcagcgaaaacggttttttattcttgttgaacatcatgttcacttcgcgtcaaaacgatagccctggccacgtaccgtggtgatcacttcatgcgggtattccgcctgcactttcttgcgcaagcggcccatcagcacgtcgatggtgtggctttcacgcagttcggcgtccgggtagagctgcagcatcaacgaatccttgctcaccaccttgccggcgttgcggatcagggtctcgatgatggtgtattcaaaggcggtcagcttgatctgttgatcgttgacgctcagttcgcggcgcgacagatcgatctggaacggcggcagcacgatcacttgcgaagccaggccgctgttgcggcgcatcagcgcctgcatgcgggcgatcacttcttccaggtggaacggcttggtgacatagtcgtcggcgccggcttccagcaccgccactttgtcctgccagctttcgcgggcggtcagcaccaggatcggcagcttggtctgatgggcgcgccagcggcggatcaggctcaggccgtcttcacccggcaggccgagatcgacgatggcgatatccggcgcgtgttcctgcaggaaataatcggcttccttggcgtcttcggccgcgtcgacctgatggcccatctcgcgcatctgaacggaaaggtggtgacgcagcaaaccattatcttcaacaaccagtactcgcatggcgaactcctgtgactatgcgggtgaacgtcctgtcacccacgcgataaaagggaacacgctctgcggcgtgtcagggaataacgcggccacctgaaccattttgacaaaaagtgctgaggctatggtaggtataacccgcccggctcgcaagagagccgaagcaatgtattaaaataagcgttatcaatttgttcgccgacattatcgacaagctctgataaacgtcggataaacagcggcggggcaacattaaacgcaacttaaacgccccaggcattgcccgcgaaagggaagtgtgagccggggcgcttgataagctttaaaggtactaataaggtattattgaggcaacggtacattttctcaggagcgacggatgaagcaattaacccaggcagaacgcatagcgggcgcactttacggacagatgctgggcgacgcgctcggcatgccttccgagctgtggccgcgcgagcgggttaagcgccatttcggctggatagacggctttctcgatgggccggcggagaacaccgccgcctgttacttcaaggccgggcaatataccgacgataccgcgatggcgttagcgctggccgatgcgctgcgggaagcggaaggcgaggtggtgccggaactgatcgcccgcaacgtgatccgctgggtggacagttttgacgccttcaacaagaacattctcggccccagttccaaactggcgttgagcgagcagaaggcgggcacgccgatcgccgagttggaaaacaacggcatcaccaatggcgcggcgatgcgcatttcgcctttgggctgcgtgctgccgtccgcgccgctggaggatttctgccagcaggtgtggctggcctccagcccgacgcacaaatccgacatcgccgtcgccggtgcggtggcgatcgcctgggccgtcgcgcgagcggtggagggcgcggactgggtctcgattcgtctggcgctgccgggcgtggcggagtatgcccagcgccggcaggagacgacgttcagcccctcgctggcggcgcgcatcgagttggcgtttcaggtggtggatgaggccgccgatcccgagcaggcctctgagcggatatatcaactgatcggcgccggggtgagcaccatcgagtcggtgccggcggcgctggcgatggtgcagctggcgcaaaccgatcctacccgttgcgcggtgctgtgcgccaacctgggcggcgatactgacaccatcggcgcgatggccaccgctgtctgcggtgcgctgcacggtgcagaagcgatcgaacccggattgctggcggagttaaaacgggtgaatccgctggacgttgaggcgtatgcccaggcgttcgtgcgttttcgccgccgccggcagggcgaggtgtgagccgccgcaaggtgcaacgggtcagctttcgctggtaaactcatacatgtcgctgcggcagaagctttcgctgtattcgacaggcttcttgcagtggtcgaacagcgtctggcgcacgatcagcagcggcatcggttctgatagctgcagcgtccggcggatatcgtcgtcggccatcgccgcgctgacctggctgcgcagcgagcccatctccacattattgcgccggaagtaatcgtagagcgagatgccaatctcgtcgatgttggcaatcgccgccgccaccacgtaggacaccgccaccgacatcggccgccgatcgataaagtgaatgcgcttgagttggtagatcggcgctccaaccgccagctggagcctttccgccagtgcggcgctggccggcacccgctcgcggctgatccattgcgtgtccggctgacgcccctgttgcgtcgcctcgcgcgagaaccctttgatgtccgctaaggaatagcgcagcttcggcgcgggccgttgcggctggatgaaggtgccgtagccgcgtgaacggccgatgatgccgtcttgctcaaggcaggccagcgctttgcgcaccgtgatgcgcgagatgccgagccgttcggtgaacaggcgctcgctgggcaggaaatcccccgcgctcagcaatccttgctcgatagcctggcgcaccgaggcgttaaagcgcagatacagcggcatcgcgcccgcgctggccagatcctgcagcagtttttccagcagacgctggttgatctccttgctcatagctgacggaagtcctgtagccgcaatgcgatggcttatttaaggggatttcgccgggcagcgcaactgccgccgccgctgggagaaaatgaggtagagtagtgtgcaatcgccccaggctcggagaaacagactgcccatgagtgacaccccacgacacgcggacgacgcggcaatcctggcagccttcacccagcagcgtcagcaggggctgacccgacgttcggcgctgcaccaggccctgttgcggctcatcaccgccggggaactgccgtggcgggcgaagctgccgccgagccgcgcgttggcggcccggctggcggtggcgcgtgacacggtggaacagacctacgcgcggctggaggcggaggggttcatcagccgaacggtggggcgcggcagctttgtgcgttatcgctgcgatacgctgctcggccgtgaactgctggcgacgcaggcaggccaggaggcgcggctggcggaacgcgagttaagcgatcgcggccgggcgttgctggcggtcagccatacgccgcacaccagccgccaggcctcgttgacgccctcgctggcggatctgcgggcgtttcccatcgattcatggctgcagtgggaaaagcaggcgctgcggcggcacggcgagcggctgttggggtatgccgatccgcagggcttgccggagttgcgtgcggagatcgcgcactatttgcagcgggagcggggcgtcaaggcgacggcggagcaggtgatcgtggtcaccagctctcagcaggcgctggcgctgtgcacgcaggtgctgttcgatcccggcgatgcggtattcgtcgaagagccgggttaccagggggcgaaaaagctggtgcagtcggcggggctgcaggcgcggccgatcggcattgatgagcaggggctggacgtcgggcaactgatgcaggcttcgggcggcgggcggggcgtttacatcacgccgtcccatcactacccgctggggtactcgctgagcctcgagcggcgtctggcgctgttgcagtgggcccagcgtcggcgggcctggatcatcgaagacgattatgacgccgagttcaactacgatcgacaaaccaaggcggcgctgcaggggctggacagcggcgggcgcacgctgtacatcggcaccttcagcaagacgctgtttccggggctgcgcatcggcttcatgattgcgccgccgcagctggtgcggccattggtcgccgccaggcagtttcaggacggctacacctcggcgctggcgcagatgacgctgttccactgcctgcacgagggcggctacgccgagcatctgcgcaatatgcgcacgctttacaaggcgcggttggatgtgctgtacgacgcggtgcaacgccatctcgcgccctggacgcgcccggccttgccgcagggtgggctgcagctggtttgcccgttggcggatgcggcgacggagcggcggttggtggcggcggcggccgaacggggcatccggctgtacggcctggcggacttctacaccggcgcgccgcagcgcggggcgctggtgctcggtttctcggcctacacgccggacgagatcgtgcgttttatcgccacgctggcgcaggtgttcaacgcgctgccgcgggaaaacggcggttaaaattggtctgcccggcgttttgaattggtccgtattacgccgtcgctgcgcggtgtattctgccgctattcggttatttccctaatggaaataatatcttaaccccgtgaggcgctatgaacccatcaaatcgtgaagtgaccatccgcagaatcaatggcgacgacagagcgcaatggctggcgttgtggcagggctatctcgacttttaccgcgccgaggtggcgccgcaggtgaccgatcgcaccttcgaacgcttggggcaggatgaacaggtgtacgggctggtggcggaggatgccgacggccggctgctggggctgatgaacctggtattccatccgtccacctggagcgcggtgggctattgttatatcgaagatctctatgtgtcgccgcaggcacgcggccataaagtgtcggaaaaactgttcgaacaggcgtatcggctggcggaggcgcgcggcagcgatcgggtctattggatgacccaggagtacaacgcgccggcgcgttcgctgtacgacaaaatcggcagaagaagctcgtttatcgtgtatacccgttaaccgcaggaggcgcgtatggcaatgaatcgttatggtcagccgattggcgaaccgatgccggattggcagccggctcgccgcccgggcggcgtgacgctcggcgggcgtttctgttcactggcgccgctcgatccgcagcgggattacgccgcgctgtatgacgctttccagctggcgccggacggccgcgactggacctatctgtctatcgaacggcccgacacgccggcggcgatgttgcagcacctggagacgctgcaggccaacccgacgctggtcaatctgacggtgttcgacgccgccagcgacgcgccggtggggacggtggcgctgatgcgcatcgacgaggccaacggcgtgctggagatcggccacgtcagctggtcgccgttgatgaaacagcgctccagcgccaccgaagccattgcgctgctgctgcgttatgccttcgacacgctgggctatcgccgctgcgagtggaagtgcgacagccataacgcgccatcgcgccaggccgcgctgcgcttcggcttccgttacgagggcaacttccgctttgcggtgatcgtcaaggggcgcagccgggataccgactggttcgccatcaccattgaccgttggccggcggtgcggcaggcgttggcgcgttggctgagtgcggacaacttcgatgcgcaggggcggcagatagcccggctgcaggtgttgcgcggcgaataataagcaaaaaggcggcccgtgggccgccttgtcgttgtgggtctaacgcgcttacttcagctcgtcgaccatggtggtggcgcggccgatatagttggccggggtcatcgccttcagacgggttttctcttcttccggcagcgccaggccatcgatgaacgcctgcatgccggcggcgtccacgcgcttgccgcgggtcagctctttcaatttctcgtaaggcttttcgatgccgtagcggcgcatcacggtctggatcggctcggccagcacttcccagttgtgatccagttcgtccagcaggtgcgcctggttgacttccagcttgctgatccccttcagggtggcctgataggcgatcagcgcgtaacccaggcccacgcccaggttacgcagcacggtggagtcggtcaggtcgcgctgccagcgggaaaccggcagtttgcccgccaggtggcccagcacggcgttggccagccccaggttgccttcggagttttcgaagtcgatcgggttgaccttgtgcggcatggtggaagaaccgatttcgccggcgatggtcttctgcttgaagtggttcagggcgatgtagccccagatgtcgcggtcgaagtcgatcagaatggtgttgaaacgcgctacgcagtcgaacagttcggcgatgtagtcatgcggttcgatctgggtggtgtacgggttccaggtgatgccgagcgaggtgacgaacgcttcgctgaactgatgccagtccacttccgggtaggcgacgatgtgggcgttgtagttgccgaccgcaccgttgattttacccatgatctccacgcgctccagttggcggtactggcgctccatgcggtaagccacgttggcgaactctttaccgacggttgacggggtcgccggctggccgtgggtgcgcgacagcagcgggatatcgcggtattcctgcgccagccctttcagcgcgtcgatgatcttgcgccagtaaggcagcaccacgtcctgacgggcgctttgcagcatcagcgcgtgcgacaggttgttgatgtcttcggaggtgcaggcgaagtggatgaactcggacaccgcgtgcagcgcaggcaccgccgccactttttccttcaggaaatactcgaccgctttcacgtcgtggttggtggtgcgctcgatggttttgatgcgctgtgcgtcttcttcattgaattccgcgacgattttgtcgaggaaagcgtttgcgtcggcgtcaaaagcgggaacttccttgatttctgcgcaggcggccagtttttgcagccaacgtacttcaacctgtacgcggaatttcagcagaccgtattcgctgaaaatggggcgcagtgcgctgactttatcaccgtagcgtccatcaacgggggaaacggcggtcagtgaggataattccatcggtagcaactcctgggatcgattaacaatgagcaacgatattttgcgcctgcttgaacagacgattacgggaaaacattaactgcaggcggctgccgccgacctgttgccacagcacggcggcgcgaatgccggccagcagcgtggcgcgaaccttggcctgcacctgtgggttctgcaggatggccggcgagccggtcacctggatgcgcggcccgagcgggctgaccacgtcgacgtaaatgccggccagcgcgctgatgatggtgtccgattcaagatcgaagtgcgccagctggcgctcgagctggccgaggcgttcgccgagcgtgttcatcgcctgtttgttggcgttgagcttgcgctccagcaccatcaggctgatggtgtagcgggtcagttccgcgcccggccctttgttgttggcattcagcacgcccatcagggtttcgaggccgaccatcaaattgcgttcctcgccgccgaacaccgccagcgtagagggtgggtccatctgcagcaggcttttcagcgaggtctgaaacgcttcgcggttgcattgcccttcatgggccaactgctgaaccaaacgcgccgactggctgatgcccgccatggccagcgtgatgtcataataattcttcgccacgatgactcctgtaaacgcggtgaacggtacatggcttactgcataaggttgtgtgtatcgcaggggtaacggcggcggccgcgaacggtaacgatcgggcgtggctgtaacaacgatgacaacgaatgccgcggatcatgccacaaaatcgagggtaaacccagcgtctaatacgtctgcggtgaggcggaggtgccgtgcggcgcagaactgcgcaaataggcgacgaaaatcgccggcgcggcggcgcgaacttattgttgctgcggcaaataaagtgcggcggctgcatctatactgccaacgtgaaccctcaaataaagacctttatatgcacgtaaaaaacaagcagccactgccggcggtgacgctggcggccatcggcgtggtgtacggcgatatcggcaccagcccgctgtataccctgcgcgaatgcctgacggcggaggagggcatcaccctgacgccggcctcgatttacggctttttatcgctgattttctggctgctgacgctggtggtgtcgattaaatacatttgtttcgtgatgcgcgccgacaacgacggcgagggaggcattctgacgctgatgtcgctggcgatccgcaagctggatgcgcgctgggtgccggcggcggtgctgatcgggctggtgggcggcagcttcttttacggcgatggggtgatcaccccggccatttcggtgctctcggccatcgaggggctgcagattatcgcccccgagctggacagctttatcgtaccgctgtcgctgctggtgctgaccgcattgttcgcgatccaaaaacgcggcaccggcagcgtcggcaaactgttcgccccggcgatggttatctggttcctgacgctggcgctgctgggcctcggcggcattttgcatcaccccggcgtgctgcgggcgctgaacccttactgggcggtgaatttcttcctcgaatacaaggccgtgtcgttctttgcgctgggcatggtggtgctgtcggtcaccggcgctgaagcgctgtacgccgatatgggccacttcggtaaaaaaccgatccgtctggcgtggtttacgctggtggcgccggctctggtgttgaactacttcggccagggggcgctgctgctggccaacccggcggcgatcaataacccgttcttcctgctggcgccgacctgggcgctgatcccgctgctggtgatcgctacgctggcgacggtgatcgcctcgcaggcggtgatctccggcgtgttctcgctgacgcggcaggcggtgcggctgggttacctgccgccgatgcgcatcatctatacctccgatcaggagtccgggcagatctacattccggtggtgaactggctgctgttcgcggcggtgctgatcgtgatcgtcagcttcaaacactccagcaacctggcctcggcctacggcatcgtggtaaccggcaccatgctgctgtcgtcgattctgctgagcatcgtggcggtgaaaaactggggctggccgcgctatctgggcgggctgatgctgctggtcatgctgtgcatcgacgtgccgctgttcggcgccaacctgatcaagctggcgaccggcggctggctgccggtggcgctcgggctaatcattctgctgatcatgctgacctggaagaccgagcgttcgcgcctgatccgccgattgcgcgacaatcaggaagggctgagcgcgctgatcgagtcgctggagaaggcgccgccgaagcgggtgccgggcaccgcggtgtttatggagcgcacgccgcatgcggtgccgctggtgctgttgcataacctgaagcacaacaaggtgctgcacgagcgcgtggtgctgctgaccatcgtcaccaccgacatgccgtacgtgcacaacgtgcagcgggtggcgatcgaacagctgtcggcgagtttctggcgggtggtggcgagctacggctggcgcgagacgcccaacgtgacggacattctttaccgctgcgggctggaggggatgagcttcaccatgaacgagacctcgttcttcatgtcgcgcgatacgctggtgctgggcaaacggccctggtatctgcgcgtgcgcggcaaggtgttccagctgttgcagcgcaacgcgctgcgggcgccggacctgttcgaaatcccgccgaaccgggtgatcgagctgggggcgcaggtggaattttgaataaaaaaacgctgcggtaaacgcagcgtttttcttgggcggcaggcgaattacgccaggcgctgttcgatgatgccgccgccgaggcagatttcgccctggtagaataccgccgactgaccgggggtgacggcggagaccggctcgtcgaaacgcacttcgatgcgttcgtcgtcgagcggggtcacggtgcaagggatatcctgctggcgatagcgggtcttcaccgtgcagcggaacgggccgctcagcggcagacgatccacccagtgcagctgctgcgcgataaggcctacggacatcaggcgcggatgatcgtgcccctgcgcgacgaccagcacgttgttggccacgtctttatccaccacgtaccacggatcttcgctgctgtctttcaggccgccgatgcccagccctttgcgctggcccagggtgtgatacatcaggccctggtgttcgccgacggtctggccgtcaacgctgacgatcgggcccggctgcgccggcaggtagcggccgaggaagtcgcggaacttgcgctcgccgataaagcagatgccggtagagtctttcttcttggcggtgaccagctccagctgctcggcgatgcggcgcacttccggcttctccagctcgccgaccgggaacaggctctgcgccacctgctcgtggctcagggtatagaggaagtagctctgatctttgttgccgtcgacgccgcgcagcaggcggctcttgccgtccacatcctggcggcgcacgtagtggccggtggcgatgaaatcggcccccagatcttcggcggcgaactccaggaaggctttgaatttgatctctttattgcacaggatgtccgggttcggcgtgcggccggccttgtactcttccaggaacagctcaaacacgttgtcccagtattccgccgcaaagttcaccgtgtgcagttcgatgcccagcttgtcgcagaccgcttgcgcatcggccagatcggtcgcggcggagcagtactcttcgtcgtcgtcttcttcccagttcttcatgaacagcccagcgacctgatagccctgttgctgtaacagataggcggtaacggaagagtcgacgccgccggacataccgacgattacttttttctggctgttgtctgacatggggatctcacgaacttgaacacgaaccgtgctgataaaaacaagcgcaggattttaccacgttggccgcgccggcgcactgttcatcttgtgctgcccggcgcccttaatgcggccaggcgaagctgccgaccagcgacagcgggtagcgctccggctgctgatagctgcgaatgctctccgccaccagcgcggaacgcaggttgggcgcctgcaaaatctcgtcggcgctcagccacaggcagcgatcgatgtcgctgtcgtgcggctcggtcggcagcggctgttccagctcgatgacgaagcagaagcgcagaaacggtgtgcgatccggcgcgatccactggtgcaggcgcaggaacgcctgcggcgtggcgcggatgccggtctcttcccacagctcgcgctcggcggcctgcaccagcgtctcgtcggcctccagatggccggccggctgattccacagcgctttgccgttgatggtctcttcgacgaccaaaaatttgccggcggcgtgcaccacgcaggcgacggtgacgtgcggtttgaacatgcggtctccttacagcggtttatcgatgcgccggtagatgtcgtccagctcggcgatgcgggtgcggtagcttttgagcagacaggcggtgtcaccgccgcaccgctggcgcttggtcagccaggcctgctggctgtcctgcatcgcgccgcgcgcgcccatggcgaacaggccgcgcaggaattgatatttggtggccatttgcacgtccagatcgttcagcgtgcggtcggcgcagatggcgcgttcatcgctgcctgccgccttggcgcagtcgaagctggcggcaggggcggcgaacggggccgccagagcggcgagcagcagcgcgatcggggtagatttcatggcgcctccatcagttatcggtctacagggaatcgatgattttccattcaccgggctgcagtgaacccagcgaaagattacccatactgtagcgaatcaggcgcagggtagggaacccgatatgcgccgtcatgcgacgcacctggcggtttcgcccttcgaacagggtgattttcaaccagctggtggggatggatttgcgttcgcggatcggtgggttgcgcggccacagccactgcggctcggcgaccaactccaccccggcgggcagcgtcgggccgtctttcagcgtgacgccgctgcgcagcggcgccaaatcgctctcctgcggcgcgccctcgacctgcacatagtagattttgccggtgcgcttgcccggctgggtgagctgcgcctgcagctggccgtcgttggtcagcaccagcagcccctcgctgtcgcgatctaggcgcccggcggcgtaaacgtcggggaaggggatgtactctttcagcgtggcgcggccggcttcgtcggtgaactgcggcaatacgtcgaagggcttgttgaataacacaatgcggcgcggccccttcggcgcggcgggtttggcggcattcggcttgctgaatcgtttaacgttgtgatttctaacagagaattttttcataacggttgagattacggatgataagcgcattataaccgaatccgtttcggattggcgcggaccgaatattcaagtagtatctacacgcatcttacaaagcattaacaaaattgcgcttgaaggagaggttgatggaaagcaaagtagttgttccggcagaaggtaaaaaaatcacggttgacgcccagggtaaactggttgttcctcataacccgatcattccgttcatcgaaggcgacggcatcggcgttgacgtgactcctgccatgatccacgtggttgatgcggccgttaaaaaggcttaccacggcgaacgtaaaatctcctggatggaaatctacaccggcgaaaaatctacccacgtttacggtaaagacgtgtggctgccggacgaaactctggacctgatccgcgactaccgcgtcgccatcaaaggccctctgaccaccccggtcggcggcggcatccgttctctgaacgtggccctgcgccagcagctggacctgtacgtgtgcctgcgcccggtgcgttactaccagggcaccccaagcccggtcaaacagcctgagctgaccgacatggtgatcttccgcgaaaacgccgaagacatctacgctggcatcgagtggaaagccggctccgccgaagcggacaaagtgatcaaattcctgcgcgacgaaatgggcgtgaagaaaatccgcttcccggagcagtgcggtatcggtgtgaagccatgctccgaagaagggaccaagcgtctggtgcgtgcggcgatcgaatacgccatcaccaacgaccgtgactccgtgaccctggttcacaaaggcaacatcatgaagttcaccgaaggtgccttcaaggattggggctatgagctggcgcgcgaagagttcggcggcgagctgatcgacggcggcccatggctgaagatcaagaacccgaacaccggcaaagagatcgtggttaaagacgtgatcgccgacgccttcctgcagcagatcctgctgcgcccggcggaatacgacgtgatcgcctgtatgaacctgaacggcgactacatctccgacgccctggcggcccaggtaggcggcatcggtattgcgccgggcgccaacatcggctccgactgcgccctgttcgaagcgactcacggcaccgcgccgaagtacgccggccaggacaaagtgaacccaggctccatcatcctgtctgcagagatgatgttgcgccacatgggctggttcgaagcggctgacctgatcgttaaaggcatggaaggcgccatcgccgccaagaccgtgacctatgacttcgaacgcctgatggaaggcgctaaattgctgaaatgttcagagtttggcgacgctatcgttaaacacatgtaagtgtgttcagcgcttgaatgagagcgggagcctaagggctcccgttttttttacggttcaaatatgtgtgaggtgtcggacaggctcactgagtggcgttagccgattcacgcaccaccagcaccgggcaattggcgtggcggacgacggcggtggcattggagccgaggagataagtgatcgcagaagggcggttggaacccatcacgataatctccgcgttgagcgcatcggcgagctccaggatctgatctttaggatcgccgacggcaacgtgcgtggtcactctatcttcaggcacgctgaattctttggccgcttttgccagcccctcggttgctaccgcaatgatttcgtctttagtttctatcgccgccgtggcggcaaagccgaaagcggcataggtggcgcgcgacgggatcaccgccaggaaatggacgtgggagtcttcgagcctggcgagcgcgttgacatgcgggatgacctgctgtgttaattccggttcggtaatatccacgggaaccaaaatagttttgtacatactccctccttatcgttttcaaaaaactccactttttggattatagctgcttaacgcagggaaaggggagatccaggtggcagaactaaagaaacagttttgctaaattagcaatactaatcgaaagcttgctactggacgattagtctaacactctactacctgggggtgaggtttacctggacgttagaggcatagaaggtgctaatttgctgaaatgttcagagcttcgtggtgctacctttaggcatatttaatacgttcggtgttttaatggaagacaaatctcagcgtgttcgtcttgatgcatatgtaataatcattgacataattccgtaaggtgacttgttaatgattcggaaaaataatgtacctgaatataggcatttttcggttgtattattttaacgtttttatgatttttattagtattgaggaatctatttttaggtcaaaatagactatcgatcttctatgggttatggcttgccgatatggtttctatggcttttttttgatataggtatagatgattatgtaggaacttaacccaccatgtttttacattttctaataatacctaattgaactgttttgtttggaataatttgatggtttagtgttatagataatagttgcctttaacataaatttttaatgacgatcaagaggtgcataatgaattttagtttgatactttacagatataatactgctctggatagaggcagaaaaacagtacaattatcaattgcaataatgactatttggatggcgttatgtgtattcgtttttaaaattgttgatctttcattcaataagggtgacttaaacgccagtattcatgttgactttgactgggatgtgttttcttcatgggggatcgtgatatttattacattgattggtgccgtgttccatggattccatgcgtctaatgctgaattaaaaaatgcgaatgcaataatagacgacttatttatatccgaagataaagatatggacaaaaagttaaccagtctgaacaatatcgccagcgagcttgagcgttattgtatcaaagcatctgcactgaatttgatttcatttatgcttattttcttcagtttccttcatggttatctatcaattggagaaataatccaagggcttagggagagtaattacctggctttgatagtcgtgtctgtatttatattggcttttgttgcatattatcatgatgtgattgtttttcttaatgaccgaaaacgaaagcgcaacaaagaaaaggtgtaaattattaataatttcagtatgttgattgttaatggggattgatgtgtcttatcgctatatacatttttttcatttttttaaattgagagtgtatttgacatgtgaagaaaatatgcgtttaaccttaagggagagggctgtttcatcgaaactctcgtcttctacgctgacggctgctttttatgagtcttacatcacttttcgattgtgaatattgagctgctattgttattgttttttaactgacaacatccataaggacagggatatgaaaataacgcattcaggctataaaaccggcgttgctacagtattggcggcgatgaccgcgctggcattaacggggtgtgccaagagcacggcccccagccaaaccgatccggtaaataaagaggttgacgatcttttcaccaaccttggcgacccaaagacgccggcaccgggaaaagagaaagaacactatatcgcccagttgcaggccgcgattcaaagccatttgaaagatgccgaagcctactcaggcaagcgttgcacattgagcatcaagctggcgccggacggtatgctgatcagcattcaggctgaacaaggggaaccggaactttgccaggccgcgatcaaagcaatcgccaatgcgcgtctgcctaagccgccaacggccgcggtttacgaagcggtcaaaaacagcacgttggaatttcgcccgcagtgaataaacaacgctgtttccgtgcaacgctatcccggtcaaggccgggattttttattgccgtcaccctgcgttaatgggtgaaaatcactaaagcctttgatgaatggtgacgataacccttaaaactcctgattataaaagagtggccatgcgttttttctgggtcaacatcggtggcagcgtcgcggaagttttgaagggcgaattcttgtgggcgccgcaatatggaataaataagactgggaacatgtttaaacctgccgggtgggaaacggtcaaaaaagtcaaagagggtgacctgattttttgccacaagggtaggaagattatcggcgtggcgacagcggtacgcgatgcttactctgcaccgcggcctgagcatcgggtcgcgggaccgccgcatattgcgggtacccaagtcgatttggaactgacgcgtcttgaactccctattgatgtttccctttttaatcaggcgttcatacgcatgcacaaccaggcttgccttccgcgcgtttttaataagaaaggcggatgcaccgaaaactatatgtgcgagatccccgcgccggcagccgcgttgatcgccggttttatctcggaaaatctctctatcaacctccatgcggataccgtcgaaatcaccagagaggtcggtggtgagcaagaaagggtgattcaggcgcggattgggcatggtccctatcgcgataaaatgtttaagcggtggggaaatcggtgtgcggtcacggggattgctgagccgtccattctcattgcctctcacatcgttgcctggtcgattgcgaccccagaagagaaagtggatccgcacaatggtctgccgttaatccccaatctggacaagctgttcgatcgcggcacgatcagttttgccgatgacggacgtttgctgtatccgcagacgaagagcagcttgttagatgagttaaagatcccgctggatgcgaacattagcgggttgtctgaaaagaacagagcttacctgcggcggcatcgagcgagatggggttttgaagtagagccctgatgcaggtttgccaaatcaggaccggggctcttaccgatacatcatcgcgctcacgcgctcgcttcggtctttaaaaccgttgctgcgcatcgtgaccacatagtagcgatagtgatgtttctgtgcgtattcgcgcaccagatcttcggcgaacaggccgctgaaggtgacggtggtgacaaacgtcaggcctttcacttcgtaggtgctgatctcttgcggggtgccgatatacggcggcgggaacacggttttgtggaactggcagcccgccagcagcagggtaaacagcagggcggcgggtatttgcggtatgctcatcgggaaaagctttccttccttggcgtgtgttttagtaactctataataggattacaaaattcggcggggatgtaaaaattatcccgcttcggttgccgtttcgttgaagcggtgtcgccgccccccatcagaatgaagggataaacatgtttgttcgtcttgccactgaaaccgatgtcgcagccctgatcgccctcgacagcgtcgccgaacacgaaccgcagcgcgcggcgcagatccgggcctggtgcgggcagggggattgctatcttgccgaggaacaggacgtggtgatgggctatggcgtactgcactatcacttcttcggctgcggttttatcgagatgctgatggtcggcgagcgctatcgccgccggggcgtcgggcaggcgttgattacggcattgaagtcccattgccgacacccgaagctgttcacttccaccaatcgttccaacctgccgatgcagcggctgctgctgaacgccggatttgtcgccagcggccagattgacaatctcgatgacggcgatccggagcaggtcttttttatcccgctgcgctaatacaaccggacatcgaccgcctgctgttgcagccaggtgctgacgtagccataagcggcatagaaggccagcagcgcgaagatcagcaccgaaagcgaggccaaaaatttgacgtcgccgtgcttcgaaagctggtaagcacaaaagataaaggccagcaggcacagcagggtgaaggcgatggccagcgtggcgtagaaaataagcataacgaaacccgttcttccttgtgagcctggcaaggataccacagacaaaaaaaggggcccaaacgggcccctgcgtgattcgctgcgggaggtttactccaccgcgtcgggatggtttttgccttcctcgataaattcttcgtcgatctcttcgatattctcctcgctgtcgcggccggacaggatgttccagcaggcgatgaacagcgcggcgatcaaggggccgataacgaagccgttgatgccgtagatctccatgccacccagggtggagatcaggatcaggtagtccggcattttggtgtctttgcccaccagcagcgggcgcaggatgttgtccaccaggccgatcaccaccacgaagaacactaccaggaaaatggctttccacagcatgccggtggcgaagaagtagatcaccgccggcacccagatgatggcggagcccacggccgggatgatcgacaggaacgccatcagcgcgccccacagcaggctgccgtcgatgccggtaaagtaaaacgccagcccgccgagcgcaccttgcaccacggcgaccaccaccgtgcccttgacggtggcgcgggagacggcggcgaacttgacgaacagatggtgtttcacgtgctgggagagcggcagcgcttcgagcgccaggttcaccagataggggccgtctttcagcaggaagaacagcagatagagcatcacgccgaagccgacgacgaagttgaaggtgcccttgccgatcaggaacacgctgcccgccagatattgcccgcccttgagcgccacctcggaaagctgcttttggatctcggcggcgctgttgaggttatgctccgccaggaagcgctgcgcccagctgggcaggtggcgcataaagtccgccagcatggtcggcaattggctgttgttggtctgcagcttggtgtagatcacgttgaattccatcgccagcgacgaggcgatgatcgccaacggcgtgaacacgatcaggcaaatcagcgccaccgtcagcagcgacaccacgccgttgcgttcgccgacgtactgcttcaacttctttttcaccggatggaaaatcaccgccagaataaccgcccacagcaccgaggagtaataaggccccagcacgtcgagaaaggcggcggtaacgatgaacaggatcagaataaagaatcccttggaaatgcctttagacatcatagtcgtccctcaaaagatgaattttcagcatagatgaactgaatgaaaacaacactatcatcacctttgcttaaccggtaggggatttttagtggcgtattccatagggttattaagggcaaggcgggcgccgcacggtgaacaggcggcggcgtgagaaaagaaagagggctaaataattaacaaaatttatcgattgtgtttcattttgtgagccgcgcttgccgcctgcgccaggctttcctagtttttaggagggcggccgttcgcccgataccacgaaggagtatgcaaatgactgaacacaaacgacttgccgttatcgaaaaggtgctgctgatcgctttcgccggtgtgctggtttatcttgccgcgaccggcgccttgtcattatcgggtctggaccatcactggccttatccttcgcgctgagcgtgattgatctcaccacgcagacccgataacgataactagcagctgtaccctacaacactggatcccagaataaatcgcccgtcattcgcctcgttctttggcgcgcagggcggtgacgctctctccgccgacgccccagttgtcggtggctacctcgtcaatcaccacgaaagtggtgtggcgtggcttattcagcacctgctccagcagcgcggtggttccctcgatcagcatgcgcttttgcgcggcgctgaccccttcgtcggtcactttaatgttgacgtatggcatggcgtttctccccggtttcaccagacgccggcggtggcgccgccgtcaaccgcgagcgccgcgccggtaacgaaattggcgtcggtcagatacagcaccgcatcgacgatgtcctgcggctggccgacgcggccggttggcgccagttgccgcatctgcgccagactctgttcatcattttgatgcatcggcgtggcgatgatgccgggcgccacggcgttgaccatcacgttgtgcggcgccagctccaacgccagctcgcgcacggcgtggttaaggccgcctttaatcagcaccggcagcaaagcgggcactttgctgttgggctgcatggcgatcgacgcggtgatggcgacgatgtggccggcaccgcgttgctgcatatgccgggcggcggcctgcgccgggtagaagaagcctttcagattggttgccaccatcgcgtcgacctcctccggcgtatagtcggcgatcggcttggcgataaatatgccggcgttattgatgagaatatctacctgaccaaaagcctgtatcgccaggctgaacaaccgttcggcggtttccggcagcgcgatgtctcccggcgccagcagcagattggccgggcggccgagtttgtccgccgccgcctgcagccgttcaagcgaacgggcgtttgcgacaacctgatagccgcgcgccaggtaggcttgcgcgatggcgaagcccaagccgctcgatgcgcccgtgacgatgaccgtttttactttgctcattttctctcctcgacaggatagggattgatcgtacgtgaacggtaatccatacctgatgattgaaaaatgagggggaaagaactttaatttataccttatgtaatgaattagcagggagagacatgcaacgccattttgacgacgttcaggtgggcagcatcgagctgttttgcctgacggtagaaaccggcagcttcaccgcagcggccaatgccgccgggataacccctgcggcggtcagccgctcggtcgcgcgtctggagacgcgattgcaggcgaagctgtttatccgcaccacacgccagatgcgcgtcacggatgccggccagcgttattacctggaatgtcgccgggcgctgagccagctgatggaggccgaggcgagcatttccggcgaacgggacaaaccggtgggcacgcttagcatcagcgcgccgacgctgtacgcgcattttaggctgttgccgcgtttgcccgagtttgcgcaacgctatcccgatctcaagctgaatctgcacgtcagcaatcagaatatcgatttctccgaagataaattcgacgtcgccattcgcggcagcgagctgaacgactccggcctggcggcgcggcgtctagaggaggctgaactgatcgtggtggcgacgccgggctatttgcaacgccaccctgcgccgctcacgccggcggatctggcccggcacgattgcattcagtatgcgttgcccagcaccggcagaaaaaccgcctggacgtttaaggttcagggcgaaaacagcaaagtggatactgccgggcgctggctttgccaggaagattacctcgccacgctgacgctggtgaaaagcggcgccggactgatgcaggtgtatcgctttaccgtcgaacaagagttgagcagcggggcgctggtcgaggtattgaaagattacgccggcgcctcgcgtcccttcatcctgctttacccctatgcgcgctttgtcccgctgaaggtgcggaaattcatcgatttcctgacgcaagcgtagccgccagcgccaataccgctccagacgccgccgccgccagcaccagccacgccggggcagcccagccggctgcggccacgatggcgctcagcgcgaccgggccgatcacctggccgaggtagtttccctgcatcaccagcccgaggctcagcggcagcagcgtcggttccggcgtcgccgccggcgtggcggccaaaatggtggcgggcagtatgccggcgatggcgcagaacaggaaacacagcgggatcagcaggccgttgggcgtcatcggcaggaaaatgccgacgccgaagaccccgatcaacaggctggtggcggcgagcagcgttctggcgggtagcccgcgcgacagcagcacgccggcggcgaggttgccgacgatgttggccgccaccgccgccgcgctgatgccgccggcggccgccagtgacagaccgatgcgctgcatcagaaagatcggcagaaaggtcatcaccgagaaaaactgcaggttgtatgtggtgaacatcagcgccagcaacagcggctgacgcgcccgcagcatcgcgcccagcgcttgtcgcagcggcaacggcggagcgtgcgccttggcggcgcggcgggacgtggtcagcggcagcagcagggcggccagcagcgtcaacgccgcaccggcctgccagctctgctgccagtcggccagatgcgggccgaaaaacagtgaaatggcgatgcccgccggcatgaaggtgctccagatgccgaacaccaggttgcgctgcgccggggcgacgatgcggttcagcaccgccggcgaggcaaccaccacgatcacgaagccgaggccttcgacaaagcggctgacgatcagcccgctgaagttgtgcagcgtggcgccggcgaagctggcggcgctgatgatcagcagcccgagcgccagcaggcgccggtcgccccagcggcgcaccagcagcccggcggcgatgccaccgaacactccgacgaagggaaaggccgaaatgacccagctgagcgcctccagcgagcggccgaactcggcctgcagcgccggcagcgcgatggtggccttgcccacgtgcagcgccgcggcgatgccggcgaacagcacgttgatgacggccagccagggcgtggcggcgggggaaatgcggtcgatggcgtccggtttaatcgcagtcataacactctccagtggcggtaacgccctcactatgcgtctgcgctacgacagaagtcgttcaaatgctgcgctgtcacgtggggaaattattcatttcgagctttaatttgcgcgcctcgttgtttggtgcgccagcgtgccgcccggcgtggacgctcgcccccctgcagcggtttactgttccggcacgcagcaggcgtgttgaattcactttataaggagcagtgtatgtcagagatgatgaacgagagtagggcgccggccattgaatggagctatggcggccggggcgatgatatcagcagcagcctgagcctcgacacggttgaggagcagccgcagggtttcttgatgacggtcgatcggccggtgcagatctttacagaggcgctgtcgccgatgatggcctttgtcacgctgctgcgcccgctgtatgccaagaccagcgcaggcttccagtatgtgccggtttctaacccctggaccgacgtgcagcgcctgccggccagcgcggggtatctgggcgtgcaggtcaacgccgggctgttcttccacggcgccaagccgacgcactataaagatcgcgacggccagatgaaaccgatcgacggcggcactattttgcagaacatcaccgtgctgcatcaggtggcccagccgctggggcctggcgaaggcgcggtctgagccggcagtgctatcacggggccggacgcggccccttatcgcgccttgaaaccgtgcgccggttgggtaaaactggctgtctattcaaggagaagagtatgtacagcgacaacgagaaaaagttttatatcatcctcaaccgcaatcacgaaccggccacgctgtttaacgcctcctgccatctgacggcgggcatcaccgatctgatcgagcagcgcgagtttcaccactatccgagcagcctcgacggcgtcagtgccaatatgagccactacccgatcgtgatcctgcaggctaaaaacagcagccagctcagcaacctgatcctcaaatgcaaggaggagggcgtgctgtccaacttcttcaccaccaccatgctgtcgcactccgccgagcagcagatcgccgacaccgccaataccccttacgagcagctggatttcgtggcggtggcgctctacggcgacactgaacagcttaagccgctcaccaagaagttctccgtctaccgttaatcgcgaacggcatcacatcaggggcggcaacggctatgatatttttccatcaaatcgttgatggagatgaacatgagcggcaagaaaaccaccatggcggccatcgccagagaggcgcgggtcggcatcgccaccgtcgatcgggtgatcaaccaacgcgcgtcggtgcggcccgtcacccagcgccgggtgattgaggcggcgaaaaagttggggttcgcgttggagaagtcccactgcctgtcggcggtgctgggcaggccggaacgccgcctgagaatggggttcatcctgctgcggcgcgaacactctttctatgcgcaactggccgatgagctgatggcgcaagcggcgccgtatcatgagccgggtcagccgccgcagtttatctttcactctctcaatgccatcggcgacaccgccgccgccattagccaattgagccgccaggtggaagcgatcggcgtgctggcgctggatcaccccctgatccactatgccgtagaagaagccgcccaggcgggcatcaacgttttcgcgctgctgtcggatttatcggtgcccagccgcgccggctacatcggtctggataatcaaaaagcgggccgcaccgccggctgggcggtggatcgtctgtgccggcggcagggcgacgtcggcgtgatcatcggcgacaaccgttttacgtgtcaggaggcctgcgagatcggtttccgctcctatctgcgtgagcagatgagcggtcagcgcgtgctggagccggtgcgcagccatgaggacgcggaaacggcgcgccgggtcacgcgtgaactgctggcgagccacccggagctggcggcgctttacgcgccgagcggcggtgtggagggcattattcaggcgttgcgagagagcggccggcagcgcgacatcacgctggtgtgccacggcccggtgcagggcggtgaaatggcgctgctcgacggcacggtggatctgctgctgtgccaccgcattcccgaattggccgccacgatcgtcgagacgttgctcgccgccgatgaacaaccgggattacggcacatcattaatcgcttcgatgtgatcaccaaagaaaacctctgacggccgatgagtggtggttgccgagagccgcgcgcaaccaggcgccgcctatatttgattaaaaaccatcaaatattttatcaaaaatagcgcgatctctatcaaaaaataaaattttcattattgatggttttggaatttttgtttgatactgtcggcattccctgcaaaaaaggagccgtcgccatgactttgcctatcgccaatgcgccctgcagttggggcgtagatgatccgaacaacccccatttgccgccctacgccacggttctgcaagaagcgtcggcggccggctaccgcagcatcgagctggggccgtggggctatctgccgacgcagagcgaggcgctgtgcgccgcgctggagcagcatcgtctgtcgctggtggccggcacgatttttgacgatctggtcagcgaggcgaacattgagcgcctgctggatctgacgcatcggatttgccgcaacctctcgcgggcgcccaaggcggagccgagcgagggcgatcgcgccgcgccgccgttcctggtaattatcgatttcggcaatccgcaacgcgccagattcgccgggcgttcagatttagcaccgcgtttgtcgcaggcggagtggcagaggatgatcgggcacattacgcgcatcagcgaactggcctggcgggaatacggcgtgcggccggtggtgcatccgcacgccggcggctgtatcgagttcgccgacgaaatcgaccggttggcggcggacattccgcatcacaccgccggattgtgcctggataccggccatctgtattacgccgggctggacccggctgcctggctgagcaagcactttgaacgtcttgattatctgcacttcaaagacgtcgatccgcaggtgttccgcgaggtgctggcgcgcggcgtcgattttttcaccgcctgcgctgagggcgtcatgtgcccgttgggcagcggggcgatcgattatccgcagctgcgtgcgctgttggccgagcgcggataccggggctggatcactatcgagcaggagcgcgatccgcgcaatgtgcagggcagcctgcaggacgtcaccgccagcttgcgctacttgcgcggcctcggcttttaaccaggagaaacacgatgatcaacggcagcaaacctttggcgagatcgttgcgctggggcatggtcggcggcggcggcaccagccagattggttacatccaccgttcggcggccttgcgcgacggcgcgtttactctgttggccggcgcgttcgacattgacgctgaacgcgggcgtgattttggccggagtctgggcgtggcggcggagcgctgttatgcggattatgccgagatgttccgcgccgaagccgcgcgggcggacggcatcgaagcggtctcgatcgccacgccgaacaacacccattacgccatttgccgggcggcgctggaggcgggattgcacgtggtgtgcgagaagccgctgtgtttcagcgtcgaagaggcacaggcgctggcggcgctgtgcgagcggcagcgcaaagtcatcggcgtgacctacggctatgccgggcaccagatgattttgcaggcgcggcagatgattgccgatggccggctgggggaaattcggctggtgaatatgcagttcgcccacggctttcacgccgcggcggtggagcaggataatcccagcactcgctggcgggtcgatccgcgctttgtcggccccagctatgtgctgggcgatctggcgacccacacgctgttcctggcggaaaccatggcgccgcagctgaagatccggcggctgatctgcagccgacaaagctttgtgccgtcgcgcgcgccgttggaggacaacgcctatgtgctgatggagtatcacaacggcgccatcggctccgtgtgggcttcggcggtcaactgcggttcgatgcacggccaaaaggtgcgcattgtcggtgaaaaggccagcctggagtggtgggatgaacaacccaatcagctgcgcttcgaagtgcagggcgagccggtgcggatcctggagcgcggtatgccgtatctcgccgcgtcggcgctggcggacgatcgcatcggcggcggccatgcggaggggctgtttgaagcctggtcgaatctctaccgccgcttcgcgctggcgatggacgccaccgatcggcgcgacgcggccttcctggccgacttctggtacccggacgtgcaggccggcgcgctgggcgtgaagtgggtggcgcgctgcgtgcaatccgccgaaaccgacgccggctgggtcgccttcgactgagcgcgcgattcgctcagacgctggccccgtcgtagctgtggatctgtaacgcatcgagcgcgacgtcaggcacgcagcgcagattgacggcgcacatcgcggcgccgtccggcgcggtgccgtaggcaaagggctgggcgccgcagactcggcagaactgatggcggatcttgtgctgattgaaggtataggtgctgagctggtcttggccgctgctgagcgtgaacgcgctgatgggaaagaaagacagcagcaggcctttgcggcggcagatcgagcagttgcagctgagggcttcggtcggcagttcggcgtctacggagaaggtgacggcgccgcagtggcagcttccctggaatgacatggcgatgatcctgtaacaggggagggtgtttgcccagtatagtgcaatttatcgtcactcggctgcacccggtctggtttccttagtaaatgcacggttttctggtaggttagaggttaacgtcatcaaaaggagatcgcgatgttagaacattactatccggccaatatgggcgccgaaccggtcacggacgaacagcacaaacggctggtggcggtgcaggcggcgctggagcttatcaaggctacgctgtcagacaccaacgatggcaacggcgtggacttccagctgaaggcggcggagaagcacatcggtccgatggccgacgccattcaggaagccctgaagtaacggttcgccgtcacgtcaaccgcccgtatcgggcggtttttttttgcgccgattactgcgatttttttagtggcgcattgcctttttcccggctggtgccacgagcggcgcgatcctactctagcgatccgagtcctcatcagggtcatgctcatgttccgcttcagcttcttttctttcttattgccgtgccgccgatgcgtcacccagttggccggcgctgcgctgttgctctgcggcgttatgcaggcgcaggccacgcaacgcatcgagttttcaccggaccccgccggcgcctaccctgagggcattgcctggaatgcacgcgccggtgcgttccttatctcctccctgcgcggcgggcagcttggcctggtctacccggatggccgctatcggcggttttccaccggcaaggggcttatcaccacctccggcatgctggtggacgccgaacgcaaccgggtgctggtgtgcaacgaagacgtgggcgtgtcccgcaactctgccgccggcacgcgcaatcgcgtggcgcaggtgctggagttcagtctcgataccggcgtgctgcagcagacgtacgacctttcatcgctaagccatgggccgacgctggccaacgatctgacgctcgacgcacagggcaatatctacgtcaccgacagcttccagccgcagatttacaagattgatcgggcaacgcgccaggtgtcgattttggtgcgctcagcgcgcttgatgccggccgacgcacccgccgctgcgcagggcacgcggccctatctcaatggcgtcgtgtatcacccggacggcttcctgattgcggcggactacacccgcgggctgctgtggaaggtgacgctggataccacgcctgcgataagtgaaatcaggctgccgcagcggctgaaagggccggacgggctgcggctcaaaaacgcccatgaattggtgatcgtacagtcttttccgggtgaaaaggggagcatgtccggtgacgtgacgctgctctcctcgaccgacggctgggccagtgcgcgtatcgctgcggtcgccgcgccgccgggattggatgggccgaccggcgccgcgctgcgcgatggcgaggtatgggtcgtcaactcccgttacccccggctgtttgctgacgtcgctcaggcggaaagtaccaagacgttcagtatcgtcaaggtagcgttcgaaccggtcgcagcggatggccgccgatcggcgacggttgccaacccggtcggaataggattaaatgcgcactgactgtataaataaacaggtgcgctgcgatgagtctgatgttgaagggtgaaaagattgaccgtaaccgctttaccggcgaaaaaattgaaaacggcagttttatgctgtgcgatttttcgggcgccgatttgaccggcaccgagtttatcggctgccagttttacgatcgcgacagccgacagggcggcaatttcagccgcgcgatactgaaagacgccagcttcagaagctgcgatttgtcgatggccgatttccgccatgccagcgcgctgggggtggagatccgcgaatgccgcgcgcaaggcgccgattttcgcggcgccagctttatgaacatgatcaccagccgcacctggttttgcagtgcctatatcaccaaaagcaacctgagctatgccaacttcgccaaggtggtgctggagaaatgcgagctgtgggaaaaccgctggcacggagcgcaggtgctcggcgccagcttcagcggctccgatctgtccggcggcgaattctccggtttcgactggcgcgccgccgatgtcacccaatgtgatttgagcaacgcggaactgggcgagttggatttacgcaccaccgatctgcagggcgttaaaatggacagtcaccaggccgctcaactgctggagcggctggggatcgcgatcatcggctgagtaactgccgcagtcccagtgcgatgatcaaggtgccgcaggcgcgatcgatccaagccttgctgcggcggtaggcgccggcgacaggcgcgtgcgacaagaccagcgccaccagcccataccacaagctggctatcaccgcgacctccagcagcatggcgaggaaagtcggtgtagaaacatggctgggcgccgctgatgagaagacggcggcgtaaaacgcaatggatttggggttggcgatgttggtggcgataccctgtagaaaggcggcgcgaaaaccgctttttccggtggccgctggggtgccggaagagggcgccgcctgggcgataagccgatagccgaaccacattaaatagccagcgccggcgactttaatcgccatagccaaccaggggaacagggcgaaaaccacgccgatgccaagaagggcgctgctcgcccagaacagattgaccagcacgatgccggccaccaaggcaaacgcctctgtccggcgtgctgaaacggctttgtgagcgacagcgacgaaattggggccggggatcaccacgccgacaatatacacggtgaaaacggcgagtacggcggacatatcgatcatggaagattgcctgttacaacaagagtaccgttagttttataacgaatcccgcacagaatccacccgaccgatcgcgccgccgctccgatgacggccgggaagaattacgcatgcggcacattccggtgaatgtctgggacaccgaggcgatggcgctcgtcgaccgtttgccgagggggcaggcgagcggcccggcgctggactaaacttaagatgcataagaaacatgcggcaaggagcgccatcctgtttacggatctgacgaggagggccgccatcatggcttaccggcatatcgttgtcgccacggatctcagcgaagacgccgagttcctgctgggcaagggcgccagactggccgccgcgctcaatgccaaactttccctgatctatatcgacatccaccgcgccggctattacgtcgatctgggcgtgggcgattacaactacaccgatcgcaccttttcggagcgggtgaagaatatgctcaatgcgatcaaagggcagtcgtcgtatccggtggcagaggtgatcgtcagccgcggcgcgttgacagaagagctgaaccgggtggcgaaggaaaaagggttcgatctggtgatcttcggccatcatcatgatgtctggagccgactggtctcttcggcgcgtcaggcgatcaacgagctgaacgttgatctgctggttgttcccatcgagaaaaaatagtcgcggccgcctgcgggcggctgccgttttccattcgcatcgcttatctctgggtgaagataactgcatacctgcaataattccgcttgctgacaatccgcccgaaaaatagtgactgcctggaattttattttttccatcaatatgttggccaaaatccgataaaggttaatccagcgcattgaaatcactgtcatacctccttttggttaataaaccgcacgttttgactggctctccgcgaagaggcgtcttatcctcggggcaatgagatttgtatgacttatataaatacgttcacatggaggaggtctcatgcgttttgacaataaagtcgtggttatcaccggtgcgggcaatggcatgggggaagcggcggcgcggcgtttctccgccgagggcgcgatcgtggtgctggccgactgggccaaggaagcggtggacaaggtcgccgcttcgctgccgcagggccgggcgatggcggtgcatatcgatgtgtccgatcacgtcgcggttgaaaaaatgatgaacgaggtggcggaaaaactgggccgcatcgacgtcctgctgaacaacgccggcgtacacgtggcgggcagcgtgctggaaaccagcatcgacgactggcgtcgcatcgccggggtcgatatcgacggcgtggtgttctgctccaaattcgccttgccgcacctgctgaagaccaagggctgcatcgtcaataccgcgtcggtgtccggcctgggcggtgactggggcgcggcctattactgcgcggcgaaaggcgcggtggtcaatctgacgcgcgccatggcgctcgatcacggcggtgacggcgtgcgcatcaactcggtctgcccgagcctggtcaaaaccaacatgaccaacggctggccgcaggagatccgcgacaagttcaatgagcgcatcgcgctggggcgtgcggcggagccggaagaagtggcggcggtgatggcgttcctggccagcgacgacgccagctttatcaatggcgccaacattccggtcgatggcggggcgaccgcctcggacggccaaccgaagatcgtctaagcgttaacgcacaggcccggccatgatgaccgggcctgctgttttagacgccgatgcggtcgcgcagcgtgtagtaggccgcgccgatggcggtgaacgggatctgcagattgcgcccgccgaagaacggcaggggcggcagtttggcgaaggcgtcgaagcgttcggcgtcgccgcgcatcagctcggcgatcagcttgcccgccagatgggtgcaggtcacgccgtggccgctgtagccctgcatgtagtacacgttattctccagccggccgaactgcggcatgcgcgacagcgtcagcaggaagttgccggtccaacgatagtcgatacgcacccctttcagctgcgggaaggtcttcagcagctttggccggatcaggttgtcgatgtcgtccggatcgcgcgcgccgtacaccacgccgccgccgtacagcaggcgatgatcggcggtgatgcggtagtaatccagcaggtagttacagtcttccacgcagtaattctgcgggatcagcgcctgcgcgatctccggcgccaacggttcggtggtcaccacctgagtgccgcacggcatgctgcgtttggccagccgcggctccagcttgtcgcccaggtaggcgttgccggcgacgatgacgaagcgcgccttcacctggccgttggcggtgctgatgagcgccggttcgccgtggcggatgttcgtcaccgccgattgctcgaagatgcgcccgccctgcaggcgaatcgcctcggcctcgcccagcgccagattgagcggatggatgtggccgccgctgtgatcgagcagcgcgccgacatagcgatcgctggcgacctcctggcgcacccggtccgcatcgagcagctcgagctgggtattgccgtagcgctcccagttgcgcttttgctcgatcagcgcatggaactgcttgttgttcagggcggcgaagatgccgccggggcggtagtcgcagtcgatggcgtagcggctgatgcggctgcgaatgatctccgcgccttcaaacatcatgctgccgagcaggcgggcgctttccgcgccgtagcgctcctcgatcacatcgatgtcgcggctgtaagagttgaccaactggccgccgttgcggccgctggcgccgaaaccgatgcgcgccgcttccagcaccaccacgtcgtaaccggcttccaccaggaacagcgcggaggagaggccggtatagccgccgccgatcacgcagacgtcgcactcgagagattcattcaattgcggatagggctgatgagcgttggccgtggccgcatagtagctttttacgtgttcagtcatgagagaagcccttattccagcgagatccaggtggttttcaattcggtgaatttgtccagcgcgtgcagcgatttgtcgcggccgttgccgctctgcttatagccgccgaacggcacggtcatgtcaccgtcattgtagttgttgacgaacaccgtgccggctttcagctggcgcgccatgcggtgcgcgcgcgccagatcgcgggtccagaccgcggcgccgaggccgtagtcgctgtcgttggccagctgcagcgcctgttgctcgtcgtcgaaggcggtcaccgccaacaccgggccgaagatttcatcgcgcgccacgctcatggcattgtccacctgggtgaggatggtcggccccagatagccggcgtggtcgccctgtggatggtcgcgcccgtcgaggaacagtgcggcgccctggctcagcccccgctcgatatagccggccactttctcgcagtggccgctgtcgatcagcgtgcccatcaccgtggcgggatcgagcgggtcgccggggatgaaggccgccgcatgtttgcgcagcgcctgcaggaacgcttgctcaatgctcgcttcgaccagcaggcgagtgccggcgatgcacacctgcccctgattatagaagatgccggcggcggcgctgcgggcggcctgatccagatccgggcagtcggcaaagacgatgttggcgcttttgccgccggcctccagccagacgcgcttcatgttcgattcgccggcgtaaatcatcagctgtttcgccaccagcgtagagccggtaaaggtgaggacatcgacgtcgcggtgcagcgccagcgccttgccggcgtcgtggccatagccgggcaccacgttcagcacgccgtccggcaacccggcctgttgcgccagtttgccgagcaggatggcgctcagcggcgatttttcggagggtttgagcaccacactgttgccggcggccagcgccgggccgagcttccagcaggccagcagcagcgggaagttccagggcacgatggcgccgaccacgccgatcggttcgcgctcgatcagcgccagcgcatcgcggccggtgggggcgatttcgccgtacaccttatcgatcgcttcggcgtaccagcggatgcagcggatagcgcccggcacgtcgtcgcgcaggctgtggcgaatcggtttgccggtgtccagcgtttccagcagcgccagctcttcgtgatgctgctccatcagatcggcgaagcgcagcagcgtggctttgcgttgcgccggcgcggcctgcgcccagtcgccgcgttcaaaggcggcgcgcgccgcgctgaccgcccgatcgatgtcggcggcttcaccgcgcgcgacctgcgccagctcacggcggccggcgggatcttccacggcgaaacgcttccccgcggcggccggttggtagcggccgtcgataaacagctggtgctcaatcttcagggcctgcgcccgttgttgccaatactgcaaatggtgaaagttcatgcttggctccgttgatcagaatgtcgtcggcgtatgggcgctgataatccggcaaatgcgcgccgacgtgttgctgaagctgtggggaatgccggtattgatggcgtagctctgcccggccagcaggtgatagctctggccgttgacctgcagcaccacttcgccctccagcagcgtgccgatctcttccccttggtgtttgatgcgctcgccggtggtggtgcccggttcgtaggtctcgatcatcattgccagcgtgcggttcggatcgccgttgtggatcagcttcatcgaaacgccctggctgccgatttcgatcagatcgtcactgcctatcacgatctgcggctgcgccggtttttccggctcggcgaaaaacgccgacagcgacagaccgtataccgtcagcagcttttgcagcgtgctgatggccgggctgaccttatcttgctcgatagtactgatggcgctgtgggttaacccagacagttcggcgacccggcgctgcgacaaccccaattgttgacggatctgcgacagacgttttcccggtgccaagctgacgtcgctcatgggcgtttttccttttgatagttccgacaggcggtgatgaaaccatcaaacaacaggcgcgacagggcgtactcgtcgctgttccactccgggtgccactgcacgccgagcgcgaagggctgatcgcgcacgctgatcgcctccaccagtccgtcggcggcgtgcgcctcgatgcgaacgctcgcgcccagggttttggcgccctggccgtgcagcgagttcacccagaatctgttgcaatccggtatcagttgcgaaagtagccccccttcctgaacgatgacttcatgggcgggggcgtattgctgttccagcggcaggtcgtgatcttcacgatgctccagcagctcgggcagttcgtacaggcggcgatgcagggtgccttgggtggcgaccaccatctcctgcatgccgcggcaaatggcgaaaaggggaatgcgcctgtcgaacgcctggcggagcagcgccaggctcaacgcgtctcggccaggatcggcgtcaggctcatcgccgttttcaccataaaggtgcggctgcacattactggggctgcccggcagcaaaatgccgtcgaggcgtggcaacagttccgccagcatttccggctccgccagcgcgtgcggcagggcgatcggcaagccgccggcggtgataacggcattcaggtacttttcttgcaaggtctgtgtgaggtgcccgtttaacctatacctgcacatgacgacgccgatgactggtctgttaaatatattgtccatgctatccccttggtacgttcgaaattatgaacgataagcttctccaccgccgatttcgttcaatattctataaatctagcagtcgattgggcaatattcaaaccaaaagtaacacttgcaaaacaaatttgtttcatctacgtttcatttgtgggcattatattgaacaagacggtcaataaacatcgacgacagcaaaacacaaacggcgggtgaaccatgcagaccaacatcgtagaagtggaaaactttgttcagcacagtgaagagagacgaagtagcgcgttccagcgcgaagtgaagaagtatttggaacgttatccgttaacccaacatgtcgacgtcctgttgaccgatctgaacggcagcttccgcggtaaacgcatcccggtcggcggcctgaacaaactggagaagggctgttatttccctgcgtcggtatttgcgatggatattctcggcaacgtcgtagaagaggccgggctggggcaggagttgggcgagccggatcacgtgtgcgtgccggtgccgggcacgctgacgccgtcggcggcggatccgcaatatatcgcgcaggtgctgctcaccatgctggatgaagatggcactccctttgacgttgaaccgcgcaatgtgctgaaccgagtgtggcagcgtttgcgtcagcgcgggctttcccccgtggtagcggtagagttggagttctatctcatcgatcgtcaacgcgatgcggagggctatctgcagccgccttgcgcgccgggaacccaggagcgcaacacccaaagccaggtgtactccgtcgataacctgaaccatttcgccgatgtgctgagcgaaatcgacgagctggcccgtttgcagggcattccggcggacggcgcggtggcggaggcgtcgccggggcagttcgaagtcaacctgcaccataccgatgatgtgctgcaggcctgcgaccatgcgctggcgctgaaacggttggtgcgcatggtggccgagaaccacaacatgcaagccacctttatggccaagccgtatgaggagcacgccggcagcggcatgcacgtgcacatcagcatgctgaatgcgcaaggcgacaatgtgttcgccgacgacgacggcgaagattcggcgctgctgaaacaggcgttggcgggcatgatcgccctgatgccgtcctcgatggcgctgctggcgccgaacgtcaacgcctatcgccgtttccagcccggcatgtatgtgccgacccaggcttcctgggggcataacaaccgcaccgtggcgctgcgcattccctgcggcgatcgcgacaaccaccgcgtggagtatcgcgtggcgggcgccgacgccaacccttatctggtgatggcgaccattctggccggcatcgtctacggcctggaaaccgcattgccgctgcctgagccggtgaccggcaacgggctggagcaggacgggctgccgttcccaatccgccagagcgacgcgctgtacgagtttgaacatcagccggtgctcaatgcattgctgggcgaacgcttcagccatgtctacctggcctgcaaaaccgacgagctggtgcagttcgagcgtctgatcaccgaaaccgaaatcgagtggatgctgaaaaacgcctgatcccgctcacctaacgactaccgcgcgcgtccggcgcatttcatcggctctcctgtggccggtgaggctgcgcgctgcggtacagaatttcttctatcacggcgtacaggacgccgacgaggaaataaccatgactcagtcatccccatgcgcaggcgtctgcctgtgccgcagtgcctacgggccggtcgccggccgtccgacagtgaccccaaaccgtttttcccgccgcctgaacagcagtttccccgcggcctctctgaatgacgttgcacggttgacagcagaggaccaaaaggggaactgccatgacgactaaagccatcgacagcggcccggcgggcaaaccgcagctgcgcaaatccctcaagctgtggcaggtggtgatgatgggcctggcctatctgaccccgatgacagtgttcgacaccttcggcattgtctccggcctcaccgacggccatgtgccgacctcctatttgctggcgctggccggcgtgttgttcaccgccatcagctacggcaaactggtgcgccagtttcccaccgccggttccgcctacacctatgcgcagaaggcgatcaacccgcacgtcggttttctggtggggtggtcgtcgctgctggattatctgttcctgccgatgatcaacacgctgctggcgaagatttacctgaccgcgctgttcccggaagtgccgccctgggtgtgggtggtgggcttcgttatcctgatcaccgccatcaacctgaaaagcgtcaatctggtggccaacttcaataccctgttcgtgctggcgcaggtggcgatcattctggtatttatctacctggtggtgcgcggcctgcacaacggcgaggggatgggcacggtgtggagcctgcggccgttcctcagcgagaatgcccacctgctgccgatcattaccggcgcgactatcctgtgcttctcgttcctcggttttgacgcggtcaccacgctgtgcgaggagacgcccgacgccgccaaggttatcccgcgcgccatcttcctgactgcgctgtacggcggggtgatctttattagcgtttcgttctttatccagctgtttttcccgaccattcaacgctttcaccaacccgacgccgcgctgccggagatcgcgctgtacgtcggcggcaagctgttccagtcgatcttcctgtgcgtgacctttatcaacacgttggcctccggcctggcgtcgcacgccagcgtgtcgcgcctgctgtatgtgatggggcgtgacaacgtattcccggagaaattcttcggctatatccaccccaaatggcgcacgccggcgctgaacgtactgatggtcgggctggtggcgttgtcggcgctgtcgttcgatctggtgaccgctacggcgctgatcaactttggcgcgctggtggcctttaccttcgttaacctgtcggtgatcagccacttctttattcgcgaagggcgcaacaaaagctggaaggatcgcttcaacttcctgttcctgccgctggtgggtgcgttgacggtgggggtgctgtggctgaacctggagaagagctcgctgaccatggggcttatctgggcgacgctgggtttcggctatttggcctggctgacccgacgttttcgtcagccgccgccgcagttggagcggcaaccgcagcaataaattcacaggcgggagtttcccgcctttctttttggcgcgtgcggcagtagagtgaaaaaactgataaaaaataacctattggacctgccttatgcccgctttgcccttgcgtacccgcgccacgctgctcggtttgttggccatcgtgctgtggagcagcgtcgtcggcctgatccgcagcgtcagcgaagggctggggccgatcggcggcgcggcgatgatctacagcgtcagcgcggtgtttttgctggtggcgctcggcgtgccgaaatggcgcagctttccgcggccttatctcatcgtcggcagcctgctgttcgtcagttacgagatctgcctgtcgctgtcgctcggctacgccaatacccgcctgcaggcgatagaagtgggcatgatcaactacctgtggccctgtttcaccgtgctgatggcgttggcgcttaacggccaaagagcgaaatggttgctgctgccggggctgctgctgtcgctgttcggcatcggttggatcatgagcggcgagggcggctggtcgccggcgcagatgctggccaacgtgcgcagcaacccgctcagctacgcgctggccttcagcggtgcggtgatctgggcgctgtattgcaacctgaccaagaagatcgcccagggcagcaacggcgtggtgctgttcatcgtgctgaccgcgctggcgctgtggctgaagtacgccttcagcgcggaaagcggcatgcagttcagcctcggcgtgaccgtaacgctgctgtgcgccggggtggcgatgggggcggggtatgccgcctggaacgtcggcatcttgcacggcaacatgacgctgctggccaccgtctcctattttaccccggtgctgtcggcggtgttcgccgcgttggtgttgcacacctcgctgaccgtcaatttctggcagggcgtggcgatggtcactctcggttcgctgatctgttggcgggcaactcgcggaaattaacggaaattatccgctgtcgtcgcaatgttgaactagaatttaactagccatgttgcctgaaggaacgacgacgatgagaagcgacattcaatttattcaacagcctgaaatcgacgtgcatcactatgagcgcggcgataccgttcgcctgaccacggcgaatttgcgacatgaatatcagctcgacgtttatattttgcgtcgcgacgacaagctgatttacggctcggtcgtcgcggcggcgcccaagaccgatattccggtcgccagttgggaggtgaaaaacggtgaagaggtggcgttccgccaggaaaacatcgccaaagcggtgccggcggtgaactgatttcacgttccgtactttctcctgatgctgatgaaggccggcgctggcgcgtcggctttttcttttccacctcgtgatgacgccctgatgtcatttggctcaaaaactgcgctaaaaaacgcggtgcatgacaaaaatcacagcgaatgtgaatttgcatgaaacataatttgacaaatgtgaacgcaatcgattacctattcgcgaaatgcgtaactggatcacagattcttacagtcagtggtttctataatgcgcgcgtcatccgagtttctgtgtgaagacaacgccaggtgtcggcagactcattgtcatcttttctaaacgggcaggaaatggccctttaagcatgtggtaataaaatgaaaaaaatagctctcgcagcaggtgtactgctcgcagcgtcttacagtgcatcatcaatggctgatagcaaagacagtcaatatgtctccgactggtggcaccagagcgttaacgtggtgggcagctaccacacccgtttcgggccgcagctgaataacgatgtgtatctcgaatacgaagccttcgccaagaaagactggttcgatttctacggttacgttgacgtgccgaagttcttcggcgtaggcaacaccccggatcgcggtatctgggacaaaggctccccactgtttatggagattgaaccacgtttctccatcgacaaactgaccggcaccgatctgagcttcggtccgttcaaagagtggtacttcgccaacaactacatctatgatctgggccacaacgccgacggccgtcaaaacacctggtacatgggtctgggcaccgatatcgacaccggcctgccgatgagcctgtcgatgaacatctatgccaaataccagtgggaaaactaccaggctgccaacgagaacagctgggacggttaccgcttcaaggtgaaatacttcgtaccgctgacccaggtgtggggcggcaacctgagctacatcggcttcaccaacttcgacttcggttccgatctgggcaaggacagtggtaacgcgatcaacggcaaacaggtgcgcaccggcaactctatcgcctccagccatattttggcgctgaactacgatcactggcactattctttcgtggcgcgttatttccataacggcggtcagtggcaggatggcgcggatatcggcaccccgcagggcccgatcaagtctaccggttggggttattacctcgtggtcggctataacttctgattttccgtgctatcagaaacagaaaaccccgcttggcggggttttttttcgtcatcactgggcttgttcaaccgggagatgcttcaccggcataaacagtctgcctttgatcacgtgacattcattatttatccaactaatgatttgttcacggctgacgccttccgactgcgcgtactgatgaagatcgccgttaaagtgccgagtgatgtattccatgagggtcatttgcacgtcttttgctcctgaacgcccacccgttgccagcctggccaccgcgggaggttgaggtttctcagacagcgaatgtaaattatcggcaacgaaatctcaacataaagcaccagattggggcgacagcggcgggaaaaagaatcccgcacggagaggcgggaaatgttcgctattatcattatggatgataagaataagatttgaggtgcgacgaaaaagagcacgctaactcttttttgttaccttcccacgctagcgtaaggcttatttttcttcaagaaaaatctgagacaagcatcggcattttcgaggcgttttgcgttaaaacaagagagtggcgcgaatgccgtaaaaccgcactgtcatctcggagttttccttatactttgtctggaaaaggccagctatagtcaacagagtcacccacgcaggaatacacaacatgaacaaacgtcgtacgactctcacggtgttggcgctgattgcatcgctggggttgtcatccgccccggccttggccgacaaaggcggcaatggtaacggcaacggaaacggccatggcaacagcggcaatcacggcaataacggtaaccatggcaacaacggtaacaacggcaatcacggcaacaaaggcaataaagataaaggcggctataggaacgacgataatctggtatccgtcagcctctcgcgcgaccgcgcccgttcgctggcgcacaactatggcctgaccggctacagctcgctgccaccgggcatcgccaaaaatctggcgcgcggtaaaccgctgccgccgggcatcgccaaaaaagtggtgccttactcgatgctgcgtgagttgccgcagtacccgggttatgagtggcgtatcgccggcgacgatctggtgctggtcgcactcagcaccgcgattgtggcctccgtgatcaatggcgttttcgactaacgtttgtcgagcgttatcgggcctcgctgcggcggggcctttttatttgccagcgcggggcggacgtggtgaactttgggccttacgttttcactgcatcataagggaggcgccatgttcagggcgttattgatagcctgctgtttgaccagttttcccgcgttggcgggcggcggcgccgccatcggcgagctggtgaaccaacggctgtcgttgatgaaagacgttgccggttacaaggcgcagcagcatttaccgatcgaagatctggcgcaggaggcgaaggtgttggccagcgcgcaggcggaggcggggcgtttggggctggagccggcgtcggtacggccttttatcgccgcgcagatggacgccgccaaggcgattcagtaccgctatcgcgccgactggttggcgagcccggaaagcgattggcagccacgcccgctggcgcaggtgcgcccgcagatcgcgcaactgagcagccagatattgcaacggttggcggagcggctgcgtgccggcccgctcggcgaggcggatcgggcggcgtttatggcgtcggtggatcaggtgaatctcagcgccgccgacaaacggcggctggcggatacgctgctggcggtcaaaaccggcagcgcacgctgagcgtcagtcgcggccgacggtgctgcgtcggaaggtcagcatccggctgcggttggcgatgagatccacgttgtaaccgcggaaatagaggcaaaagcgttttaaccacgggccgtcctggcactccaccagcatgcggccctggccgagcgggctgagcgtgccggtctgcgccgccgggccgacgccgatatgcacccgattgccgcgaatttcaaaggcggtgcgatagtgcgggtgataccacagcccctgcacatgcttcaggcagtcgccgttggccgtgaccggcaggaaacggcgcgccacatgcccgacttcgccctcgatcgcttcaccggtccatttcaatttgatcggcatatgggcagacagcgacaccgcgtacccatcctcgccctgatacagcggctcaccgctgcccagataggccagattgccgtctttgacctccagccagtgcggctccgccagggtggcgtagaggccgtcggggatcgcggcgctgcgctgcggcaacggttcgcccagcagcgtcgccatcacctgtaagaccatgccgaagctgtcgcagtcttcgcggttggccaccagcgcgacgccggcctgacggtcgggcgccagcaggaaataggttttgtaaccggcgtgggaaccgccgtggccgagcaagcggcggcggcccagcggggtttgcgccagccccaggccataggcgctgagctggccctgattgaggcggcgcggtgcgccgagttgcgccagcacgccttggccggggccctcgtcggccagcagcgtctgcaaccagcgggtgagggcgttgaggctgccggtcaggctgccggaggcggaaaggtgcaggccggcgctggcgtgttgccagccctgtggcgcacgccagtaacccggcaccaaccccggcactacgtcgaaccagctttccggcgcccgcatctgcacctgcagcggccgggcgatgtgctgttgcaccagttggtcgaaatcataccctttgctgcgcagcgcggcctccagcagccgatagccggtattgctgtaggcgatctcgctgccggcttcgtagttcaatttctccagcccctcgacgaactgcatcaccggctgcgcctcgctgacggcgtgcagcgagatgcccagcaggccgagcgtctcgcgcacgtcgggcaggccgccggtcatgtccagcgcctggccgacggtaacgtccgccaacgcgggctgcagggcggggagcagttcacccaggcgttgctccagccgaatggcgcgctcggtggcgttcagcgccagcgcggcgaagatatgcttggtcactgaggcataacgcaccacgctgtcggcggtgaagggggtgttctgcgccagatcggccaggccggcgcaggcggtggcgcggcgttgttgggcgtcaaacagggtgatggcgccgccgggttcgccatgccgttgccagccggccagcagttgttcggccaaggcgccggcagcgcgccagtttaacggtgttacagacatagggcctccagagagtattcgaaatgggcctgctcggccacacgccgcccggcgctgagcgcgggcttttgggctgattgtggcgcagtgcgtttttcgtcggccgccgttttgtgcgctgtttggaccagctagcggggaatcacgcgaaactttgatatagcgcgcagattgctgctggcgttacggttagaggcaggaggaaaacaggcgcccggcggcgcctgtaaagggggatcaattcagtctggcggcaccgtccaacaggctttcaatcatctgcttgagcaggcgctgcagcgaggcggcgcgctggggctcgaacgcaaaaggatactgttcggacatgtagttgacctgcgccagttcgagctggatcgcatgctgttgctgctgcggttgaccataggcgcgggtgatataaccgcccttgaagcggccattcagcacgtgggtgtactgctgttgctgctcgcagcaggcgaccagccgatcgctcagcgcctgggcgcagctttcaccgccgttggtgccgagattgagatccggcagctggccgtcgaacagccgcgggatcaccgaggcgatcgagtgcgcgtcgaacagcagcgcatagccgtggcgcgctttgaggcgcgccagttcgttctgcagctgctgatgataaggttgccaaatttgctgcaggtagagggcgcgttcttcgtccgtcggcgctttgcccggcaggaagcttgggcggccgtcgaacagcacgtcgggatacaggccggtggtggcggtggtgtacagcggcttatcgtccgccgggcggttcaaatcgatgacgaagcgcgaatagttgccgaccagtacgctggcgcccatcgcccgggcgaagtcgtacagctgcggaatgtgccagtcggtatcgggcagcgggcgagcgtcgtcggtcagcccggcttcgaccgccggcgtcagttgtgtgccggcgtgcgggatgctgatcagcagcggcaggctgccggtctggaagctaaaaggatcgcgaatggtcattgacgtacttctcctcggaaaatcaccgtacagggcagctggccgcccaaccaataagccagttccgccggccgcgacagcggccagtgaacgaagtccgccaccttgccggtttccagcgtgccgtggctgtgttgcagccccagcgctttggcggcgtgggtggtgacgcccgcgagcgcttcttccggcgtcaggcggaacagcgtgcaggccatgttgatcatcaggcgcagcgacagtgccggcgacgtgccggggttggcgtcgctggcgatcgccatcgccacgtggtgtttgcggaacagctctaccggcgggcattgggtttcacgcagcaggtagtaagcgcccggcagcagcaccgccacggtgccggcgttgcccatggcgcgggcgtcttgctcggtagcgtattcgagatggtcggcggagagcgcgtgatggcgcgccgccagcgtgctgccgccgagggcggagagctgttcggcgtgcagtttgaccggcagaccggcggcttcggcggcggcgaagacgcgctccacctgcgccggtgagaacgccagatgctcgcagaaggcgtcgaccgcatccgccagaccggcggccgccgcctgcgggatgatggtgtcgcagaccagattgatgtagtcgtcggcgcggttggcgtattccggcggcagcgcatgggccgccagacaggtggttttcacctcgaccggcagcagctcgcccaacttgcgcgccacccgcagcattttcagttcgctctccgggctgaggccatagccggatttgatctccacgcaggtgacgccttccgccagcagcggccgcaggcggaacagcgcctgctccagcagcaacgcttcgtcggcctcgcgggtggctttcacggtggagatgatgccgccgccctgcgcggcgatgtcggcgtagcttacgccgttcagccgctgttcgaactcgccgctgcgattgccgccgaacaccaggtgcgtgtggcagtcgacaaagccgggggtgatgatgccgccgtcgaatttcaccgtttcgtccgcgataagatcgggcggcagcgccgcatgttcgccaatccagacaatcttgccgtcgcgtacggcgatcgcgccgtcggtcagggtgtgatatttaccgtcgcgcatggtgacgatatcggcgccgtgccacaggctgtcacagtggatctcagacgtcattgctttcctccgccggagccgcagctcccacatggttgtatatacaattaaaaataacctaacgcattcaccgggatgtcacaagaggcgggcgagattttgttatcaggatgtgatcgacagcggagatgcgggcgcagggcgcgcccgccggggttcagacttcgctggtgaagcggccgaacagctgatagcggctgccggggtacagcaaccgcgccgaggtcaccacggttttgccggaccaggtgcggcgatggatcagcaggccgggttcgtgatcctccagctgcagcagctcgcgctcccgccgggtggggatcaccgcttcgacgatgtgttcgccggcggtcagcggcgcggcctgcgtcaggtaggtgtaaggggtgacgcggtcgaaatcctgcttcaggtaatccggcgccactagcgggttgacgcagcggtcttccacctgcaccggcacgtcgttttcgtaatgcacgatctgggagtagaacagccgttggccgggctgaatgcccagcgccgtcgcttcttcctcgctggccgggcgggccttcagctcgaggattttactgctgtggcgatggccgcgcgcggcgatctcatcggcgatgttgtgcacttccagcagtgcggtatgcgccttggcttcggcgacgaaggtgccgacgccctgcatgcggatcaaaaaaccttcgctggtcagctcgcgcagcgcgcggttgatggtcatgcggctgacgcccagttccgccaccagttcactttcggagggcacgcgctggtgcggttgccaatgccccgcacggatttgattcacgatcgcctgtttgacccgttggtagatcggggcgggggcatcgctcattgcagctgccagttgtaacacggtctgttgttcagccacgacgttaacctcgtcaaataaaaaaataataacaccagtttactgttgatgtcggcgtatgtatatgtatatacaactagtggccgtcgcgccagaaacttgccggcggccgccaaaaaattcctgaatgcgcgccatcgccgcgcctcattcaccgttacatcaaccgtggaatactgccatgcctgcttattttgccccacgcgctttgctccctgagggctgggcgcataacgtccggctggacgtcgatgcgcaaggttacctgactcaagttaccgccgacgctgaaccgcaaggctgcacccggctgcacggcgacgcggtgccgggcatgccgaacctgcactcccacgctttccagcgcgcgatggcggggctggcggaagtggcgggcaacccgcaggacagtttctggacctggcgcgatctgatgtaccgcctggtgcagcgtctgacgccggagcaggtggaggtggtcgcccgtcaactgtatatcgaaatgctcaagggcggatacacccaggtggccgaattccactacctgcatcacgacgccgacggcaagccttacgccgatcgcggtgagatgaccggccggctcagcgaggcggcgcatcaggccggcatcggcatgacgatgctgccggtgctgtacagcttcgccggtttcggcgcgcagccggcccagccggggcagaaacggtttatccaggacaccgaaagctatctgcaccagcagcaggtgattgcccgccagctggcggatcgtccgttgcagaatcaggggttgtgtttccactcgctgcgtgcggtggagctggggcagatgcagcagattttggccgcgtcggatcgcaccttgccggtgcatattcatatcgccgagcagcaaaaagaggtgaacgattgcctggcgtggagcgggcagcgcccggtggcctggctgtatgaccatctgccggtggatcagcgctggtgtctggtgcacgccacccatctggatcgcgacgagctggaagcgctggcgcgcagccgcgcggtggccggcctgtgtctgaccaccgaagccaacctcggcgacggtattttccccggcgacgcgtacctgcagcagcaggggcgctggggcatcggttccgacagccacgtttcgctcaacgtggtggaagagctgcgctggtttgaatacggccagcggctgcgcgatcagcgtcgcaatcgcctgacgacgccggaacagtcggcggtgggcgatgtgctgtactcgcaggcgctgcagggcggcgcgcaggcatgcggcgcgccgatcggtcggctgcagagcggctatcgcgccgactggctggtgctggacggcgacgatccgtatctggcggcggcgccggacgcctcgatccttaaccgctggctgttcgccggcggcaaagagcaaattcgcgacgtattcgtcggcggccagcaggtgatcgagcagggacggcacgcgctgcagcagcagagcagcgccgagttcctgcaggtgctgaaaacctttcagcaggaggcgtaatgggcctgacccgttttaactttgccgcgctgccggtcagcccgtggcgcaacggcggtggggaaacccgtgaaatcgtcagctggccgccgggcgcgcaggattttgactggcgtgccagcatcgccaccatcgcgcaggacgggccgttttccgcctttgcgggcatcgatcgctcgatcaccctgctggaaggcgacggcgtgcggctgttcagcgctgggcatatcgaccatcagttggcgcgcgtcggggagccgttcgcgttttccggcgacgtggcgctggaagcgacgctgctgggcggcgccagtcaggatttcaacatcatgacgcgccgcggccggcaggcggccgaggtgcggcgcagcacggcgcccgtcaccctgctacccaaccgggcgggcgtgctgtatgtgctgagcggggtctggtcgctgccggagggcggcgagctgcgggcgcgcgaaggcgtctggtggacggcgcaggcggtgagcggtgaggtgaagccgctgacggccgacggcgctattctgtgggcggacatcacagcctgctaacgcggagtagagtcctgcgcctggttatgggattattcacttttcctcattaatcataaagaagggcgcatggcttcgctgaaagacgtcgcaaaacttgccggagtctcgttgatgacggtgtcccgcgccatcaatgagcccggcaagctgcggccggaaacctatcggcgcgtcaaacaggctatcgaccagttggactatgtgccggatctgtcggcgcggcgtattcgtggtgacggaaatcgcgtacagacgctcggcgtgctggcgctggacaccgccacgacgccgttctcggtggacatgatcctgtcgattgaaaaaaccgcgcgcgagcacggctggaacagcttcgtcgtcaatctgtttgccgacgacaacgccgaacagaccgtcgatctgctgctggcgcatcgcccggacggcgtgatcttcaccaccatggggctgcgtcaggtggatgtgccggccaaactgctggacaaaaggctggtgctggccaactgcgtcagcccggcgcatgcgatcgccagctacattcctgatgacgagcaaggccagtatgacgcgatgcgcacgctgatcgccaaaggctatcgttcgccgctgtgcatacatttaccggcggatacgctggcggcggggctgcgccgccgcggtctggagcgcgcctggcgcgatgcagggcgcgatgttgaacagctgcggcagtatcatctcgatctgagcggcggcgatcaaggctatcgcgactgcgtcgcgctgctggcgcggcatttctctgccggccggcgcgattgcgatgtcgtggtatgcgggaacgatcggatagcctttctggtgtatcaggtattgctggcgcaaggatggcggataccgcaacaggtggcggtgctgggctacgacaacatggttggcatcggcgagctgttcctgccggcgttgacgacggtgcaattgccgcactacgagctgggccgccttgcggcgctgcatgtgatcgagcagcgggaacagcgtgatacggtgaaagtgccttgcccgctgttggcgcgtggttcgctgtaaccgcaccgggtgcgtcgctgcgcgcccggtgctcattcccactatccccagatgctagccagctgccatcctgtgatgggctcgaactctgcccgtccgccctcggcaaacaggctgaggcggcgatctccctccgtcggataaatgcggctggtcaggcaggccaatccctgattaacgaaaatctccagcgatgaacggtcgataaagatccgcagcgacaggatgtcaccctccggcagcggcacgctgcggcaggtgctcagggcggggttttcatgaaaacgttccagtaccagtcggtgcgcctgattatcgacgaacagccgcgctacactcccgatggccagcccgtaacgctcggcgtcgttgtcggccggtctcaatgtcagagtgagttcctgcacatcgttcgccagcggcaaatgctgattggtcagcgtctgcgccaaaaacgagtgcgacgctcggcgcagcgccgccagttcacgcgccgggttcatgcggacgctgccgtcggcggccagcgtcagctcgcgcggcagggtgagggcgccggcccaacggtgcgctttgctgggcatcggtgattcccacatatccatccaggcaaacagcagccgacggccgtcggcggcggtgaaggtctgcggcgcatagaaatcgtggccggcatccagctcgcagaagggctgggtcaccctgaagtcgccgtccggccgccaatggccgagcagatagccgctctggaagcgattgcggtagcggtagccctgcgccgccaggccctgcggcgagaacagcagcaggtgctgttcccccagcgggaagaaatccgggcattcccacatatacccttgatgcgccgtttgcgcgccgaccagcacccgatcgaagcgccaggcgcgcaggtctgcagaacggtacaggcgtacctggcccaggccgttttctttagcgccgaccaccagccaccattcgccgttctcgcgccagactttcggatcgcggaaatgctgaatgccgtccggcggggccagcaccggcccgtgcttgacgaagcgtatgccgtcttcgctggtggccagacattgcacttcccgcacctggctgtcgtcgccgggctcgcccagccacacgtggccggtgtaaatcagcgtcagcacgccgttgtcatccacggcgcagccggaaaagcaaccgtcttggtcatagggcgcatcgggtgccagggcgatgggctggtgctgccagcggatcagatcgcggctggtcgcgtgcccccagtgcatgggcccccagtgttcgctataggggtgatgctggaagaaggcatgatagacgccgtcaatacagatcaggccgttgggatcgttgatccagccggcgggcggcgcgagatggaactgcgggtagtaatcatctcggcgctctgcgcgcagggcctcgaccgcatggtcggcttgagctaaggcagtgttcattggacagactcacttgatttaatggcggatggaaagggcgctgccgtggcggaacgttcgccgcgcagcaggaaacaggaaacaagcgtcgtggcggcgaccgcgcagcccatcagcagataggtgtcggcaaagccgatgcggtcataaccgtagcccgccagcggcgacaggaagctggccatcacttgggtgatgaattgaaagcccaccaggtacagcgtggaggagaggcggctgtcgaagcggctggcgatgtatttgaagatagcgatcagcaggatcggcaactctacggcgtgcagcagtttcatggcggagatcatcaaggcgccgctgaccaagccggagccgaacatgcgcagcgccatcacgctgcccgccagcaacagcccctgcttggcgccgatgcggttcaccaacagcggagccagaaacataccgccggcttcgaggaagacctgcagcgagttgagaaaaccgtacatctcgttgccctgttcgcgtgacgcgaactgtgaggcgaagtagaccgaaaattgctgatcgaaaacgttgtatacgctgatgccgagcacaaacaccaccaacgcccagaagcccggcatgcgcagcagcgccagcgcgtcctgcagccgcaggttctccggtttgccaaacgccaggccggccatggcgttcggcttcagctcgcgcacctggctgagcagcaccaggaacaccacggcggcggcggaggccagccagaaattgatgttcggatcgatattgaagataaaaccggccagaaaggtggcgctggcccagccgagcgagccccacatgcgggcgcggccgaattcgaaaccgctgatgcggctgacgcgctcggtataagattccagcgcgccgatgccggcgaagaaagtggcaccgatgaacagcccgccgaccaacgcacccagcggcaggctgctcgccagcagcggggcgtaaacgtagataaagaacgggccggtcagcagcagcatcacgccgagaaactgcagcaggtgcttgcgcagcccaagtttgtcctgaataaacccgtacagcggctgtgcgcacagcgccaccagcgagatagcggagaagatcaggccggtctcggcgcctttaagaccgatcttctgattcagccagagtgagatcagtgaaaagctggaagaccaggtgaagaaaaagaagaacagcaggccgctgagcagcacgtaatattttttcgtttcgcggttcatggataaggtcccggtgagtgaaatcagctttattgttaacgttaactcgcgaagggatgaagctgtccgatatcacacatgcgatgttaatcacaaaagttaacgttaacattattgatttgtgatgtttctcacgcagagacgcggattaacgagcgtggttacgcatcctgcggggggacatgaaacggcggcgattggctggcggccgcaaagcgggcgatcaagaaatccaacagcaggcgcacgcgcggcggctgatagggcgagcggcgaaacacggcgtagatcccggcttcatgcggggtgaagtcgggaagaatgacgttcagacgcccgctgcggatatcgtccgccgcatcccagatggttttacgcgcgatgccgtgccccgctaaagcccactggcgtgccagcgcgccgtcattggtctcccaggcgctctccagcggcaccgtgtggctccaggcctggccgtccagggagaaatggaacgtattcagcgggccggctgcggtcaccagtacgataaaacgatggccggtgagatcggccggcgtgcgcggctcgccatattgcgccagatacgccggagaggcgcacagcacgcgtcggctggcggccaggcgccgcgcgatgagcgtttcttcgcgcggcgcgccgaaacgaatggcgatatccagatcgtcctgcagcaggttggatagggagtccgacagtgtcagcgcgatctgcagccgggggtgttcggcgcaaaattcttcaatccactgattgagaaggttgcgcccgaaatcggcggaggccgagaggcgaagtttaccgcacacgccgctttggctggcctgcagagccgcctcgccgtcggcaatcgcctgcaacgcgagggtgcagtgttgcagataaatgcgcccttcttcagtgagacgcaggcggcgagtggtgcgatcgaagagtttactgtgcagcgccgcttccagcttgaacaaccgcgcgctggcggcggcgggggaaaggccgagtttacggccggcggcagaaaggctgcccgataccgccgcttcggcaaataaacgcatgtcacccagtctgtccgttgccatttttatcaatctggatttgaaaataattcaaatggtaggccaattatcaatccgtatgcaaggtgagacgctgatgactctgcaattgaccatgggagttgttggtaatgaatgttcactctgtttccaccgatagcgataatgcgcatggcgcgctgccgccgctgaaagcattgctggcgctgacgatgagcagcttcatcgcgaccgctaatgagactgtgccggccggcatgctgccgcagatagcccgaggcatgagcatcagcgaggcgtgggcggggcaaatggtgacgttgtgcgcgctgggcgccggggcggcggcgatcccgctgacgttagcgctgggcgggtggccgcgtcgccgactgctgctgttggcgatcggcatctttttgatctgcaacgcggtgacggcgttgtcaccctgttttggcgtgacgctgggggcgcgctttttggtcggcatcgctaccggggtgacgtggagtctgctcgcgggttacgcgcgccgcctggccatcgtctcattgcaagggcgggcgatggcgatcgccatgctggggatcccgctggcgttggcgttgggcgtaccgatgagcgcctggcttggcgaactgttggattggcgctggatttttgccgtgctggcgagcttgagcgcgttgctgctagtgtggatccggctgacgctgcccgaattttacggtcgccgaacgccaggcaatgcgcgtttgcgcgaggttttctgtcttcccggcgtgcggccgatccttgccgtattggcgtgttggatcctggctcattacacgctgtatacctatcttgcgccctatcttgccgcgcgcggcctggcggccagggtggatttggcgctgttggcgttcggcatcgccgccgttgcgggcattgcgctgaccggcttatgggtggatcgctggctgcgtgcgctggtgctgttcagcctggcgggcttcgcgctggtggcgctggcgtttggcgtgaacggtttgcccgtcggggcggtttacgttggcatggcggcatggggattgagtttcggcggtgcgccaacgctgttgcagacatcactggcggatgcagcgggtgagcatgccgatctcgcccagtcgctgctggtcactttctttaatctggcttttgccgtcagcggcgcgttgggcggaattctgctggcaaacgtcggcgctaacgccatcccgtggatggcttttgtcctgttgctggtggggtggagcattgcctggggcagtgcaaagcgcggcttcagcgccgaacgccgcgccgcggcgcgctgagggggcggcgtcgccccctgtagcgagattaacgttcgttcagcgaacgcaggtgatcgtcacggcgcagcgtcatcagcgcaaacaggctgaccaccgacgtggcgaccacgtagtaggcgggaatatcgatattgccggtctgtttgatgaggccggtgataatcaacccggcagagccggaaaacaccgcattggaaagtgagtaagccagccccaaaccggtataacgcacccgggtcgggaacatctccgccagcatcgccgggccgggaccggccagtaggccgactacggcgccggcgatcagcaccgccagccctttgacccacagtgaactctgcgcatcctgcaacaggtgcagcagcggaaaggtgaacaggatcaccgccgtcaccgccgtcagcatcaccgtttttcgtcccagcctgtcgctgatgatgcccgccggcagaatggtcagggcgaaaccgacgttggccagcaccgtcgccaccagcgcctgttggaaggtggcgtgcagcgaggtttgcaaataggaaggcatcaccaccaggaaggtataaccggcggccgaccaacccatcatgcggccgatgccgatcagaatggttttcaccacgccgcccagcttcgcttccggcggtggggcggcgtgttccgcacgttgctgcgcctgggtgaacgtgggcgtttcctcgagcttgagccgcagccacagcgccacggcgcccatcggcagcgccagcaggaagggaatacgccagccccagtcatgcaactgctgagcgctgagcagcgcggccagcagcgccaccagtccggcgccggccagcaggccgagcgcgacggtcagcgattgccaggcgccgaacagcccgcgcttgcccttgggagcaaactcggtcatcagcgataccgcgccgccgaattcgccgccggcgaacaacccctgaaacatgcgcagcagcgtcagcagcagcggggcggcgacgccgatcgaggcgtaggtcggcatgacgccgatcagcgcggtggccagcgtcatcagcagcagaaccgcaatcagcgtcggccggcggccgatgcgatcgccgatgcggccgaagatcaccgcgccgatcggtcggcagaaaaacgccagcgcaaaggcggcgtaggtgaggatcaggctggtgatttcattttcaccctgcagggtgaaaaaattggcggcgataacggtggccaggaacccgtatacgccgaactcataccattcgataaagttgccgaccgagccggccagcaacgcctgacgcgagcggcgcgcgtctagagtctgttgagtcatccccgttcccatacatttgaattattgttcgtcagttctaaatttatacgacaaaacaatcaattgatttcagcgggaactgtgaggcgcgattcaccagagcaacggcgccggctcacggccattttcggcgtagtacagcgacggcaggaactgcgctagatagctgaactcgttgtagcagtggcgcatcaggttaaacccgatatcgtccgccagttcgtcgtgggcgttggcgcaggctttacccagcaggaagcggctgcgcagcacgcacccatagggcgtatcacgtaccagatgcagcatctcgccgtcacagggatcgccgttgtcatccaacgccacctggtcgccgaagccgatgcgcgcgcacacggcggcggagagcgcctgcgcatcgcgcgcctggcgcagcggctgcggtgcgaagaagtcctcggcggcgtgaaacttgaggcgcgccgcaaccggcggcagctccgccagccattcgaccgcttcgatgctggcgccgacgtagctttccccttttttccaatggcggtcccagccgcgatgttcgacgtgatcgtgcgggtgccaccagttgatgtgctgggtgttctcgaagaaggtgaaccaccagtccagcatgcgccctttacaaccgtgcagatcggttcgaaccgctacggtgagcaggccgtcggcgctgcggctcagccccatttccagccgcagcggctcgggcctgagcaactcgttgatatcgttgacgccccagggcgccagcagggaaggatgtgtcataatgggttcctgttttattttggaaacgaaatgcgtttcaaaaataaagctatgccgttatgctgagtctgtcaacgcttgtgaggaacaattatggcgaacccgaatgaagaaccgctgcgcgctcgcggccggccggccacgccggaaacggcgctgcgcgccgcgctgacgcaggcgacgctggcgctgctgctcgacggcggatacgccgcggcaacggtggatgcggtggcgaaacgcgccggggtagctaaaaaaaccctgtatcgctttgccgccaatcgtgatgagctggtggcgcaggcggtgagcggctggaccgaggcgtttcagccagccttcgcacaggatgccgggcggcgggaggcggttgcgccgctgttggaaacgggactgaaggcggtggcgcagcaggtgctgagcgccgaagcggtgggcatgtttcggctgctgcagagcgatttcccggggcgtgaggcgctgctggacagctaccagcgcaacggcattcagcgcgggcgagcgacggtggcggattggctgcggcgccagcagcaatacggctggttgcttgcgcgcgactgggcgcaaaccagcgacctgctgctggcgatgaccatcgccgaaccgttgcgccagatgacgttggggctgctgccgccgggcagcgcgatcgacgaacgcatcgcggcggcggtggcgctggtgatgccggggttgctgcgcggcgaaaacgcggattgcgccgcattgtgagccgcattcatctgtggcatgttaattgttcaatttatgtcactattttgcgatgcccccatgaatgctgcttacccgttcaaacagggcgatctgttcgccttgaccgtttttctggccgtcgccacccatcgcagctttcacgcggcggcggtggagctggaggtgacgccgtcggcggtcagccactcgataaaaaacctggaacagcggcttggggtgaggctgttcaaccgcaccacgcgcagcgtggcgccgaccgaagcgggtgagcgtttggcggcgcagctgcgcccggcgctgtcgtctatttcgcaggcgctgcatgaagtggatgaatggcgcgccacgccgagcggcaccgtgcgcatcaacgccagcgaaggggcagtcaggctggtattgcgtccgttgctggctgattttctgcgcgagtacccccatatccacctggatatcgtctgcgacggcaagttgagcgatatcgtcgccgaggggtttgatgccggcattcggctggcggaagccgtaccgcaggacatgatcgcgatgcgcgtcagcccgcccgtgcgtttcgccgccatcgccgcgcccggctatttcgccgtccatgggcgcccggcgacgccgcaggatttgctgcgtcataactgcatccgctttcgcttcgacagcggcacgatttaccgctgggaattcgaacgtgatggcgtgagcgagtcgatcggcgttaccggctcgctgacgctgaccgatcagcctctgatggtggacgccgccatcgacggtatcggcatcgctttcgttcctgaacatttggcgctggaagcgctgcacgacgggcgcctggagcgcgcgctggacgcgtggtgtccggcttatccggggctgtgcctctattactccggccatcgccacgtgtcgggcgcgctgaaggcgttgatcgagtatctgcgcgcggcgcggtcctgatgcgttcgcgttctgcttttggctacgccaattagtgagccgccttcatctccacagtgaggttcgcctgcattgttgcggcgtggagcctgccttacgctcatgaggagacgccgggcaaccgccgggcgccaccctgctgcgaggagttgatgatggataagaagatgaaagcggtagttatgaccggcgccaaccggccctgggaaatcagacaggtgccgatgccccgcacagagccgggccaggttctggtcaaagtgcacgcctcgggcatgtgttataccgacgtatgggcgacgcaaggatatggcggcgatatttatccgcaaacgcccggccatgaagtggtgggggaagtggttgaggtgggggccggcgtgcatacgcggcagattggcgatcgcgtcggcaccacctgggtgcaatcggcctgcggccgctgcccgtactgccgcgagaatcggccgctaaccgggcaaacggcgatgaactgcccggcgccgcgcaccaccggttttgccgcccagggcggccacgccgagtatatcgccatcgccgctgaaggcacggtgttgctgccggacgggctgtcttacatcgacgccgcgccgatgatgtgtgcggggtataccacctggagcggcctgcgcgacgcggcgccgctgccgcatgagacggtggcggtgttaggcattggcgggctggggcacgtcgcgttgcaactgtcgaaagcctgcggtttcgataccgttgccatcacccattcgccggacaagcacgcgctggcgaagcaactgggcgccgatcgcatcgtcgcctccgggcaggctctgcgggagaacggcggcgcggacattctgctggtgaccaccaatgacttcgactccgcgcaggaggcgatgagcggcttgcgggtagatggccgcgtggtgctgtgcgggctggacttcagtaaaccgttcgcgatctcttcggaaggggtgccgttccatatgatgcgtcagcgggtgatcggatcgacccacggtgggcagcactacctgagtgaggtgctgaacctggcggcgaaaggcaaagtgaagccgatggtcgagactttcacgctggatcaagccacggaggcttatgagcggcttgcctctggcaacatgcgttttcgcggcgttttcgtgccgtcggcggcgtgagaaaagggccgagggttcggcccttgcagacaggtatgaagggcgctgcggcgccctggttgctttacagcttaggcccggccttcaccaacttttcgcccgccggggtgacggtatatttggcgaagttgtcgataaagcgctgcgccagatcctgcgccttctcctgccacagcgattcgtcggcgtaggttttgcgcggatcgaggatcgacggatcgacgcccggcagtgcggtcggcacgttcagcccgaagatcggcagcgtgaaggtctcggcctgctcaatgtcgccattcaagatggcgtcgatgatgccgcgcgtatctttgatcgagatacgcttgccgctgccgttccagccggtgttcaccaggtaagcctgggcgccggcggcctccatgcgtttcaccagcacttcggcgtactgcgtcgggtgcagcgtcaggaacgcggcgccgaagcaggcggagaaggtcggcgtcggcgcggtgatgccgcgttcggtgccggccagcttggcggtgaagccggacaggaagtggtattgagtctgctccggcgtcaggcgcgataccggtggcagcacgccgaaggcgtcggcggtcaggaagatgattttgcgcgcgtggccggctttggacaccggcttgacgatgttctcgatgtgataaatcgggtaagagacgcgggtgttctcggttttgctggcgtcgtcgaagtcgatgctgccgtcggccagcacggtgacgttttcgagcagcgcatcgcggcggatcgcctgatagatttccggctccgcctgcggcgacagcttgatggttttggcgtagcagccgccttcgaagttgaacacgccgtcgtcgtcccagccgtgctcgtcatcgccgatcagctgacgcttaggatcggtggagagggtggttttgccggtgccggacaggccgaagaataccgccacgtcgccttgctcgccgacgttggccgagcagtgcatcgacgcgatgccctgcagcggcagcagatagttcatgatcgagaacaggcctttcttcatttcgccgccgtaccaggtgccgccgatcagctgcatgcgctcgctcagattgaaggcgacgaagttctccgagtgcagcccttgctgctgccagtccgggttggtgcatttggcgccgttcatcaccacgaagtccggctcgaagtcagccagctcttcgtcgctcgggcggataaacatgtttttcacgaagtgcgcctgccaggccacctcggtgatgaagcgcactttcagacgcgtgtcggcgttggcgccgcagaacgcgtccaccacgaacagacgcttgccggagagctgattgcccaccagcgtcttcagatgctgccagacttccggcgagagcggctggttgtcgttcttgccggtgccgttgtccgaccaccagacggtatcgcgcgtggtgtcgtcgcgcacgatgtatttgtccttcggcgaacggccggtaaattcaccggtcgcgacgttgaccgcgcccagttgggtgagggtgccgcgctccagcggcggcaggtcggcgcgggtctcttcggcgaacagcaattcataactggggttatagacgatgtcggcggcctgatggatgccgtagcgagcgagggtttgtggggtaacagcgcgtgaagacatattctacttccttatgagtcatattatgcctctttcccgtgcggtgccgcgcgcaggattgagattcggatcaagctgaccggattcagctaatgcgtttccggttctttattaataaaacagggggctttttcgccctcctatagcatagcagcgaatttaagcctgcttactttaattacaaaatgctgacgataattaattaaaaccaaccttggcggagggtcacaatattgaatttcgccggcgtaatttagttttgcatttttattttttatcatattgtcagggctgtctactgttttatttcttattagaaaaagcgaaatccacaatgggatttttcgtaatcatttgtttttgcttggctatggcagagtttttgcgccaggtgaatctaaccgtactgtacgcttgtcagcagggtgaataatgaaacagataaatgcagaactggcctgtgataaaaatacggcatcgtccgaatcctcagggttaattaatcaacttcgtcaaatggatatcggcgcggtaccgatcgccttgtttatcacgatttgcgcgatcgtagcgatttccgcctacgccaacttcctgccgaagaatatgatcggcggcctggcggtgataatgacgctgggctttgcgctggcgcagttgggaaaaagtattcccgtgctgcgcgatatcggcgggccggccattctgtgtttgatggtgccgtcggtgctggtctatttcaatgtcttccagcctaacgtcatgggcaccgtccatctgctgatgaaagacgccaacctgctctatttcgtcatcgccagtctggtggtcggcagcattctcggcatgaaccgggtgatcctgatccaggggatgattcgcatgttcgtgccgctggtggtgggcacgatcacggcggtgatcaccgggctgctggtgggcaagctgtttggctttaccttctatcacaccttcttctttatcatcgtgccgatcatcggcggcggcatcggcgaggggattttaccgctgtcgctggcctattcggcgatcctgggctcgacgccggacgtctatgtcgcgcagctggcgccggcggcggtgctgggcaacatcttcgccatcgtgaccgccggggtgctggcgcgcattggtatgcagcgcaaggcgctgagcggcgacggcatgctgatccgttcggcgcaggagaacgcgatgttcgccatcaaggagcaaggcggcaacgtcgattttcaactgatgggcggcgggctgctggtgatctgcgccttctttatcgtcggcggcctgttcgaacacatcgtgcatattcccggcccggtgctgatgatcctgttcgcggtgctgtgcaagtactgccgggtgatcccggcttcgatggaaaccggcgcgcacagtttctacaagttcgtctccaccgcgctggtgtggccgctgatgatcggtctgggcatgctgtacgtgccgctggaaagcgtggtggcggtgttctcggtcggttatgtggtggtctgcggctcggtagtgctgtcgatggggctggtcagtttcctgattgcgccttacctgaagatgtttccggtggaagcggcgattgtcacctgttgtcacagtggcctgggcggcaccggtgacgtggcgatcctgtcggcgtcgaaccgcatggggctgatgccgttcgcccaaatcgccacgcgcatcggcggcgcttccacggtcatcggtgcgacgctgctgcttggttggttagtctgagtccagagtatcttatggataaccggggttggattgccccggtttttttatgcattttttttcgcttatcgtgatagtgctgattattgccttgaaaatcattcgtgtggcgcaaatgcatagccgtactttatctaagaaaattctgtaatcggtgaaaatgtgtctattcttttctcttaagggattatcgttctcattcagagtgccgagggaaggcgccatcgcattaccgatatccccgtattgattcaacaccgggccgctgccgttcaggcaatccgccagttggggcatccccccgattgaattgacgaatatggagataaggttatgtcatcaagcaatgcttccgttaaggccgaaggcgtattagccctgctgggcgcttataaacccgatgaagacgacaccattaccgtgcttcatccgtcgaaaacgttcgaaaacgccggcctggagctggtgcgcggcgatcgcagttggcacgacaagggcgtgaccgacacgccggtctctctgacctacagcttctgggaaaaggcgccgggcaacatgtcgagcatgggcatcagcggcttcagcagctttaaccccgaacagcgcgagcaggctaaactgtcgctgcagtcatggtcagacgtggctaacatcaccttcactgaaaccagcaacaccgccgccgccaacatcaaattcggcctgttcgactacagctcgcgcggctcctatgccttcgcgtataacccggacacctcgccttcggtcgccgggcagacctggtataacgccaagaaccacaccttcgtcaacaaccagatccatgagaacgagtacggtcgccagaccttcacccatgaaatcggccatgcgttggggctgcagcacccgggcgactataacgccgcaccgggcgtcagcatcacctacgctaaagacgcgacctactttgaggacagccgcgcgcacagcctgatgagctatttcagcgaaagcaacaccgggcaggactttaaaggtgcgtactcttccgggccgttgctcaatgacatcacggcgatccagcatttctacggcgccaacatgaccacccgcaccggcgacacggtttacggtttcaattccaacaccgatcgcgacttcctcaccgccaccggcgcgcaggacaaaataatcttcaccgcctgggacgccggcggcaacgacaccttcgatttctccggctttggccagaatcagcgcatcaacctgaatgaaaaggcgttctcggacgtcggcggcctgaaaggcaacgtgtctatcgctgcaggcgtaacgattgaaaacgccatcggcgggtcgggtaacgatgtgctggtgggcaacgccgccgataacgtgctcaagggcggcgcgggcgatgacgtgctgtacggcggtaagggggcggatcagctgtggggaggcgccggcaaggacaccttcgtctatttcgcggcggaagagtcaacggcggcggcgccggattggatccgcgacttcgtgcgcggcgaggacaagatcgatctgacgctgttcaacaccggcagcgccgacggcatccgcttcgtcgatcagttcagcggcaaggcgggcgaggcgacgctgagctacgatgcgcaaaatcacgtcagtgacgtggcgatcaacctgggcggcgcctttgacggcagcgatttcctggtgaaagtggtgggacagccgctggatgcgggtgatttcgtgctggcctgatgcaggcaacaaaaatagggcactttgggcaaaaacccgacaattcctattaattacgtcatattagcgtgacatagtagcgcgcagaaggccgggcttgcatacctcgggcttctgtcggatcgccaaccttcttcggttggcgattcattttccgcctttcagcatgttgatggcggcgccgagcaggatgcgccgttcgatatcgttgctgtccgccagctgccgcgccagatgtttttccagcgtttccaccgacagcgcttcgccgcgatgacgcagctgcatcacgccgtcgccgatcaggcgtgcgacctcatcccatacgggtttaatctcctgttccgagaacgtcatggtctacctcggctggttgatttctgcccaatgtagcagctgagctgcggcttcgctacccgctgcataaaacaggaagtataaaaaacaagccatcagtatttcttctggtttttacgctcaatacttgcggtgtcgaaaagcaggagaaaacatcatgaactgggtcgaaaccttggcggagtactaccgcctgagccgcacgggtgaaacgcagcattggctgtgtcgccgctggttgcttcagggggaggcgcgtttggcctatttgcgggagttgctggagccgaccgcgccacggcggcggtgaacagggcgccggcgttgccggcgtcatttcgcgggatcaaccgaaggcgatcgccgcccaacgcaacagcagcagcgccaggcagatcagcagcagcaccaccaccattttactgagcttattgcccatgcgttttgttgccacgctgtcctcccttttagctgaaataccacccgccggcgaggaggatgaggaaaagcgtcactaacgcgacgccgttgagtaagtcgctgaacgtatcgtcagcatcgatgtcattttgccgcatgttaccgcctggcggacgccattgggtgaataatgttcacagtatgccccccgcagcgcgacaggcacagcgaagaacggtaaaaacgcgtaaaggtggcggtggcggaacgcgcagtcgcgcctgcgacggatgcagacggccggcaatacgttgtactatcctgtctgcattgaggcatttttccaaaaggtataatcatggcgacggcaattccacagaaatacgaacaccttgagcgttgggcattcggcgataccgagcagcaggccgatgaagtggtgcaattgatcctcaatggcaccaaaacggccacctgttccaacctggacggcgaggggatcccgcaggccggcgatctgttcctggtggtggacggcaagggggagccggtctgcgcggtcgagctgaccgcggtggaaatgaaaacttacgatcaggtcgatgaagcgcacgcctttgccgaaggcgagggcgatcgctcgctggcgcattggcgcaaagagctgcagcgcttcttcgaagagtacgatctgttctcgccggacatgacgctggtgttgatgaatttcaaagtcgtcgacaaattctaatcttatgcgcgccgttccctacgagtgccagtgggcgagcccggagttggccgccgatctgatagccggccgcgcgacgctggcacaagacgaaaattgggcgcgcagcggcgcccgcgatcgggcagagtacatcgagtgggccaaccacgtgtgcggcatggcctgcctgaaaatggtgctgggccatcgcgacggcgaaacgccgccgctgttggaactggcgcgccgcagcctgccctacggcgcctatgtgcgcgagggtgaacggataaagggcctgatttacgcgccgttcgtcgagtacgtgcgcgagcagttcgcgctgcacgcggaggtgaaggtggggctggaagctgccgacgtgccggcgctgctcagcgaatgccgctactttatcgcttcggtgcatcccgccattcgccggccggagagcacaccgccgcacaggggcgggcatctggtgctgatcaccgccgccgatgcgcaaagcgtgaccttccacaacccttcgggcgacagcccggcgacgcgcgagcgggtatgcctgccgctcagccgcttcgccgctttctttgccggccgcggcatcgccatcgcataaaaaaacgcgctgtttccgatgaaaacagcgcgtcgtcagccgttctgatgcactatcatgccagccgcatcacccaggcgtccgcctgccgatcgtagtgttgcttgtacagcagcgactgtttgccgtcgaggatcgccgggatgctggtgtgttcatcccagccgtccagctgcatgcacagatccggatcggacttgcagggaatgctcagggtgccggcgcggtcggcgccggcgtgaagatgcgcgtcatcgacctcgaagctgccaatttttacgacggttttgctcatgggaactccttgctcaatggtgtggtaggaggttagaccagttcggtcatcggtaagagcatagccaaatgagcaaaaaatgccacataaaaattacattttggaaacaatttccacgccggcaaaacacaacgcctagtactccaccacaaaactgaggttgtcttgatagctgccgaccgccacttccgtctgcgccgcattgaccgccgccttatacgggatgctttgcgccagcccggtgccggcgccgctctgtttgttggtgctatcccaaacggtcgtcgtgttaggcaagtaaatctggtactgcatgaagttgctggtgccgcttttcatgcgccgccaaccggtgaccgggttattgccgttggtgaaataggtgttgtatccctcggttttggtgcaggtcagggtgatgctctgattgacaggattgaactgcccgaccaacgccatgctgccgaaattgacgttgggcgcggtgccgatcaggcaatctttggtgatggtgacgctgacgctgaccgtgctgggtttgtcgacgccgtcccaccaaacgcacaggccgagcacgcccagaccgcaaatatggtaattccagatcaggttgatgctgtcggtataggttcctgcgcgcacgttggcgccggcggtggttttgatatacagcggaaagttgacgttggaggaaatcaggatcagcgacagcaggttgagcgagctgtagtcgatggtttggccgatgctgtaaggatattggtagttggcgtcggggtagatcaggtaagcgattttatcgcctgaaccgtcggtgttggcaaccgccatattgttggtggtggaggcgatcttgaccgtgacagtgttttgcgacagcaaactgagcccgagcccggtgcagttgaggccggcagtgccctgggcgttaatctgcccgttgtagaccacgaaagagctgcttcccggtaaggtgacggtgccgttggtggtggcgcagtcggcgaatgcgcgctgacagagcagcagcgagagggttagcaataaggctttcaatccccgaaacatagtgactctccgtcgttgaattagcggcagacaaccgggccgacgcgctggatgccctgaggcttcgccagactgaattccgcctgacacggcgggccgccgtcggccgggatcacgctcagacgattgtgttgttgcaccgggtcgatataggtcatgccgtcccaaccgacatagctttgctgattgccgccaaccaccgccacctggctgccgttggccagcggtttgccttgctcgtcaaccagttcgacgtcggcggcggagatgggttggatggggaactcaaccagaaaaccgctgtgatcgcgaatggcgacggttttttccaccgtcggcagcgcaacgtcggcgggcaggctaagcggatcaatctggaatttcgcatggtagtaagaggtgacggtcggcaccagtaaatagccctgggcatcggtcttgccgatcggctggttctcatagctcaccggaatgtcggcgtatccttgcgtggacaccagcgcaaaggcatcgttgatggtgttggtggcgtatacgccgccgttcatcgccaccagcgaaccgctgatttcgccccagtggttggtttcatcgcgggtgccgtatacgcccgctcgggcttcgagtctgcgggttcgccaggtcagattcgcctggcggtaatcgccgccgctcgggttattggcgtaggccagattccagccgaaaccgccatcggtcggcgcggcgcggctgtagctgacgcgttcgctccagcggttgttgttgtcgcgcgcggcgctgaggctggccgtgccccagctgtcaaacggaatggagagctgcagttgggcgctgtaaccgctgctgccgatttcccggttgagggaggcgtacaggctgctgttgcgccaaagcgacacactgtaggacaggttcaccaggcgggtccgttgagcgatggcgtcgcgaacgtcaaaataaccggcgccgaggctgcctagccggcccaggctgacgctgccggtcaactgatcggtgcgacggctcagacggtagtcgcttttatacacggaaatgtcgccaaaatcggcgctgcgcaggatgcgttgcgcgttgaggctgaaacgtgggttgctgtaggtgtagccaaagctgctctgatcgccgtggttgccggtgtagcgatagacgggctgaggatctggctgctgcaacggcctgccggtcagcgggtcataataggcgggggatggtatcggctggccgccgttaaacgcgtcgtcgccggcctggctgacgctgtaggacgcgttgagaaccccccattgtccgacgcgaatgtcggcgccgccgccgccgaccgccaactcggctgcgccttcggcgcgtccttccagggttaaccaatcagtgacgccgtaacgtaaactggcgctgcctacccattgcccgtaatcggcagaattcaacccgtagttgcgtcgcagcaagccggtggaaatgctgaaatcgctcatgccggtctgcagcaggttgctggccacgtagaacggtaccgtggtgctgacctggcggccgagggcgtcggtggtgacgacggtggcctgacccgcgccgttaatgtagggcacgctgttgagggtaaacggcccgggattaatgttggtggtgctgtttttatagctgttgatgtataaatcgacactgctgggcaatgccgcctggccggaaaactgcggtaacgggtaggtgataagatccgggcgcaccgcgaaattgcgcgccaattgcaagccgccgatgcgcacggcgctgctccaggggagcgagccggtggtaaggtcaccggcgatcacactcagcatccgttgatcatcgttgaaacgccagtagctgtcgtaccgaatatagcgaccgccatcgtcgtttggcccgccgttaaacccgctgcggtagatgccggtgttggcgacgacgccgaacccgtcgaacaggcgctgttcgctccacgccgacaggtagcccggccggccattgccgttgctttggctggcgtagatgtcgtagttgaacagcaaaccgaggctgctttgcgccggcaagcgctgcaacggtgaacgggcgccgatggtttgctgcggcaaccagtcgttgggcacgttgatcagcaactgctggctctcgccgctgtagctgacatccaccttctccagccgatcgacggcgatttctttcgcctgtttatccgctaccggcagcccggcgtcgagcagttgttggggtgtcatgtagtaatggccgccgcggtagttgaccggcacgacgttgccggtttggcgcccgttgacgaccggctccagatacagcgtggtgtccggcatgctgacggcgctgggcggcggcggcagatcgtcgccgagcgcaaacggcagccagccgccggccgccatgctcagcatggcaaacgccagcggcttaaggctgaagcgccgcgtcgatagcctccctgtcggctgcacctgggcctcaataagacggaatgactacgggctgtttgttgtcattgaccgtggccatcagcttgccgctgctgaaagcgcctgcggacggcaaggcgaagcgcatctgtgaaccgggcagcacgtatcccatcaggccaggattcaggctgcggccttgcagcgtcactttcgagatacgggcatgcactgcgccttggtttcgcacctccagccagcgttcgctgctttgctgctgtagacgatagctgagctggggttggctggcggtcgcgtaatcgcgcggtttttcgctgtcctgtttggtccaaatgcctttgccgctgacgaacagcggcaccgagtagcgcatctggaatttcagccccatctccgcgccgccgggagcggcgctcgacgctggttctttcaccggcacttcatcgaccaaaatgcggtaggcgcgctcctgtcccgccgccggggccgactgtttgatcaggcgtatcagttggcgtttgcctggcgctatcgacgccaccggcgggctggcgatcacgtcgctttggttgctgtaatcgtctttgccggcggtttgctgccaacccagcacgcgaatttgcatatagaccggtttgctgtcgcgattttccagccacagcgcggtggcctgctgttgatcttcaatcaccggatcgatcggccaaatgagaatggaagccgcggccagggcgtgctgttggcttgccaggagcaaggctgccgttaacggcagtcggaagggtatgcgcataactcaatccttattgcaaaaaacttaataagtgaccgtcaacaagaccgtatcgctgtaaacgccactggtgggcagggtactggtcgaaaacagacgggcgtaaaccttgatttcttgcgtgctgccggtggcggcgacggtctgcgccgcgccgccgttggcgccatctccccaaagggtggcgtagttgctgtcttgataaagttgatacagcagcgtttccgccgtgacggcattttgtaattttctgccgccggcgatggatccggtcacgtgattgccgacgccgagggccagcgtaacgctcagccccgggttgcagcgaaacagcaccgaaccggcaccgctgctggagacgatgctgactgcgttgctcagcgaggacaactggccgaagttcagggtgccgaaggtggtcacgtcactgacgccgctgcccaatacgcagccttttaccacggttgcattgacggtgaacggctggcttttggtcaaatcgttgacgccggtatcgctttgggccgggaaaagcggcaggcagaacagcaaaccgcaaatggaagcgcgcatcgtcattaccaattgatcgtgacctgtaccgtatcggtgtagctgcctgtcgggggtgtggactgcgccgggatcatgccatagaccggcagccagttgtccgtaccgttggcggtttgtgacacgcccgtcagattatcccaaatggtgctgtgggcggcgttggtgtacaggttgtaattcacccgttggcctgccgcgctttgcaggtagcgggcagcggtattgccgctttgcccgccgccaagcagaacgctgtagctggtgccgttggtgcatttcacccgaatggcgccggcgttttgctgcccggcgacgctggttgcggtgctgagaaaatacagcgtgccgaaattcagcgtgccgaagctgacgttgccacctgagctgctgccggcctcacaggcgctgagcaaggtcgcgctgacgccgagggtcgcggttttactgtcggcctgcgccaacagactgcacgcccataatccgcagcagcaaagcgcgcgccgcaccgttaccaggtgaccgtcatcgtgacggtgtcgttataggtgtccgccgccggggtagatccggccgccggtacgcggccatagacgatcagcggaacggcggcgccggtgccggtgccggtccgcgcgttggcgccgctgccccaggcggtggtgcgtgcggcatcctggtacaggttataactgatgaatgcgcctgccgtgctggccatgcggcgttgggtgcctgaagtgacgtggagcccgttgtccagcgccaccgtgtagtctgtgccggtggtgcaggtcaatgacagcgtaccggccccccctgcgccggtggcgctggcgtcgatgatgttggccagtgaagagtaagtgccgaagctgatggagccgaagtcgttgacggaaccgctgctgttgccgcctcccacgacgcaaccggcgccgatggtcagcgttacgcctaacgtgccttgaatggtgcctgctgcgttagccgcgccgttggcgcacagcagggttgctaccgaggtcaatgccatcagagtttttttcatcttatattccttgccgtatgagagaaagcccgcaaagacgccacccagaggtgggttgaacgtattcatttagctgcactttaattaatagaataagaatcgggaattgtcttgatgaaaacgagaaactttttattctcattccccggctggcggggctttcagacgaggtataccgataaagtgaaatgattagaataataacgaacggcgatgggaatattattagcgttattttatcgccggggagtttcattccccggcgcggcattgtttacaggtggaaatccagggcgccatcccgcaccagctcgcgcggcaggttattcttgatacggctgccaatgcgtttggcgatacccagaggttgcccctgataggtgacgatgcactcgtcgcccgccggtggctgctcagggtagagatcgcggccgtgataccactcctgggccagcgcggcgtccagctcgaagtgctgtttgccgccggcgcccgcgagggcgatcgccgcttcgtgctgccaacggaaacctttcgggaaacgctccgccagcttgagaccgatgcgcgagaagcgcaccttgccgaacagcggctccagctcggccgggaacagccagatttccttatcgcgctcccacagccggctgtcatcgccccaggttaagccggatgcggcggcggcttgggcgaccagcgtcgcctctttgccggacagtgggctgaacggaaacttaccgactttataggtcggtttcggcaacggtgccacggcgtgctgtttgcgcagacgggcgacgaaaaacccttcgctgtcgtaaatctgcgggaagacgtgcagaaaaccttcggcggtcaatgccttgtcagcgccgggaaacagctcgcccagcggttcgacgctgaccgcgtcgccgtaggtgtccagcaaccaacgcaccacctgctgattttcctgcgcattgagggtacaggtggagtaaaccatcacgccgcctggcgccaacgcatggaacgcgctgtcgatcagctcgcgttgggtggcggcgatttcggtcacgctttccggcgaccagttgctcatggcgtccggatccttgcgtaccacgccttcgccggagcagggggcatcgagcagaatggcgtcgaagctctccggcagcgcggcgccgaacacccggccgtcgaagtgggtcagcgcggtgttcttcacgccgcagcggctgatattggcgtgcagcactttcacccggctggcggagtattcgttggcgacgatgcctccctggttgcccatcaacgcggcgatctgggtggttttggatcccggcgccgccgccacgtccagcacgcgattcggcgccgcgtcgccggcgaacagcgcgctgaccggcaacatcgaactggcctcctgaatgtagaacaggccgctcaaatgttcggcggcgctgcctaatcgcagctcttcatcgtcgcgttcgatccagaacccttccgcgcaccagggaatgggctccagtcgccagtcgtaatcctgcaccagcaccaggaagtcggcgacgctgattttcagcgtgttgacgcgcaggctgcggcgcagcgggcgctgacaggcggcgataaaatcttccatcgccagctcggcgggcatgatggcgcgggtggcgtcgaggaaagcggggggcagaaaaacggcggtggatttggccacggggcgaactctcagggtgcaataaagacaagggcgagagtttatcacaaagcggaaaaaaacagggcccggcattgccgggccctgagggaaacgcgaaagttaatcgcgcggaatggcggtgccccaggttttccagtccttcggctcttccggattcagcaggaagtgcttgttcggcgtcgctttcggcgccagcggaatagtcggcggggtggcgaaggcgataccgccgcggatgaactgctggaaggtgccgctcttgatcacgccgccggtcaggccgaactgcaggttgtaacccgacgccagccagaacacgctgttgttgcgcaccagatgctgatacttcttgctgatgcgcagcgcgacgtgcacccggtcggacatggcgccaaggtagaaaccggtgatggtgccgacctccacgccgcggaacagcaccggcgtgccgatctgcagcgagccggtttcggcggcgtcgagcaccacgctcaggccgtccagatagcgcgagtcggtgatgctggcctgctgcagctcgaaggtgcgcagctcgcggccgcgacccggctccacgttgatataaggctggagcagggtatcgaggttgctgacgccggcggcggagatctccggcgagacgatcgagaagcggctgccgagacgcgcgaaggtctgcacgtattccggatacagcaccgccttggccaacacttcgttgcgctccggggcaagctgcagcgactccacctggccgacgtcgatgccgaggtagcgcagcggcatacccgccgacagcttgctggcgtcgtaggttttcagcgtgatttggctgcccaccgcgcgggcggcggtttcgctggcgtacagcacgcggttggcccccttgttcagcgtcacgccctgtagattatcgaagctgatggcacctttcagcgcgcggttgagcggcgaagcctgcaccgtcaggccgctgccgttgagctgcaccttggcgccgccttcggcccagaagatgctttcgcgcgtcagcagcttgcggtattccgggctgatgtagacgtccacctcaaactcgttggccttcggccgaacattgacgatctcgcccacctggaatttgcgatacagcactaccgagccggcctgcacgtccggcaggctggtggcgctgagggtcagggtggtagcgggggcgttgccgacgatgccttcctcggctttttcgctgttggcgtacagcgggtattggccgccaggttcccccttgctgccgggaataatgcgcacgccgccgtctacccactcctgggcgctggcgccaagcacttccatgccgtcgatgcccagcttgacgtcgaggcggctgttgaccacgaatttactgtctttgtgcagcaggccgcggtactgcgcgtcgatggcggcggtgaataccacgccgccggcggtcagcgtgcggctcaggatttggccgactttcacgccgtgcaccaccagcggctgcccgacgtcgatgccgtagctttgcggcgcattcagcgtaacggtcagcacgccaggctgttgcaacagcgtttcgctgctgtccagcacgttgaagcgttgctgcggctcgccttcgcccggtaccagctccagcgtggtgccggtcagcaactggctaagcttggcgtcgttgaggctgatgcgcgggctgcgcatcacgatgcgggtgccgctgcgcatcagatcgaccaccgaaggatcgatggtcagttcaccgaccactttgctgtcctgttgcaacgtcagcttggtcagggtgccgacctgcagcccctggtacatcagcggcgtgcggttttcgctcaggctgttgccgctcggcagatccagcaggatattgacgccgcgctggctgtgggccagatcaggatacagggtatagctctgatcgcccttggcctgctggccatcggccggagaatcgaaggcaatggcaccgttgaccagcgccgccaggctctccatctgcaccgtggcaccggacaggctgaaatcgcccttgaagccggaaacgttccagaagcggctgttgctcttcaccaggttggcgaagcggcggtcgatcagcacgtcgatggtcacgcccttgttgccttcgctgatggtgtagtcatacaccttgccgaccgggattttacggtaatagaccagcgagccgctgttgagcgagccgagatcgtcggcgtgcaggtgaatcatcagctcgccggtattcaggcggtacttcggctgggtatcgagcgcggtgaagtgggtttgctccttgccgctgccgggcatcatgccgatatagttgccgccgaccagcgcatcgagcccggataccccggccagcgaggccttgggcgtcaccagccagaactgggtaccttcgcgcagcgagtcttccagatcgcttttgatactggcctccaccacgatgctgcgcagatctttgctcagactgattttttgcaccgtgccgacctcaacgccctggtagcgcaccggcgtgcggccggcgacgatgcccgccgccgattggaaatcgatggtgacggtggtgccgcgttcctggacattgttatagaccagccacccggcgatcagcagggcgatgaacggcagtaaccagaacggtgaaatgcggcgtttgttcttgacccgcgcttcagtcggtgtagtcggcgtttcctgttgcatgtgcatcccaaatcaatcggctatcgagccactcaacggcaagaatagtcaaaatgaccgccgagccaaagtaaaacgcggccggtcccatagtaaaagataacagctggtcgcggtttaccagcgacatcatcaaggcgataacgaacagatcgagcatcgaccagcggccgatccaggtgaccagacgtagcagacgaatgcgcgtcttcaggctgtgcgaagttttgaagtggatgctcagcaacagcgtgatcagcacaatcaccttggtaaaaggcaccagcacgctggcgatgaacacgatggcggcgatcggcacgttgccggaggtggccagtgagaccacgccggagaagatagtgtcttccatccgcacgccgttggcgtaaatgatggaaatcggcagcaggttggccggtatcagcaggatcatcgccgcgatcagcgccgcccaggttttctgcaggctgtagggctggcggtggcacatcggcacatggcagcgcgggcagcggccgcgcgcgtcagggtagccggtatagtggcaggacagacaaatgtgcagcgccgccggcgggccttccggctgttcctgcggatagtaacgctcccacagctgctccaggttagcgtggatcagcgtcaggatgctcagcaccgtgagcgacaggtaggcgatcagcgcgctgcccgcctggatgtcggcgtaatcttgcaccttgatcgccgccaccgccatgccgatcagataaatgtccagcatcacccactctttgagccgctccagcatcagcagcaccgggcgcaggttcatgccgagcgcgtggccgaagcgcaggtacagcagcgacagcgccagcgtcagcggggcgccgatggtgcaaaacgccaccatgctggcggtgagcggatcgccctggcggctcatctgccagatgccctccagcaaactggcgtcgatgcgcgtgccgagcaggcggatgctgatcagcggttcggtgaaggcgaacggcatcagcagcagcatggtgatcgccatggcggtcaggcgcgtcatcgaccagtcgcggccgtgcaccaccttggcgttgcaacgcgggcaataggcggcctgattgccgctgagcggcggcagcatgaacagcagatcgcactcgcagcagcgttggtggcgcgctttggaaaggggggcggtgatcgcgtgtattttcatctttgacaagtagctgcccttgagcccgccggaactgtcagcgtagctgaaaaataaaccggccgcgtcaccggcggtcgggcgccggacggtaaaacgaggtaaaccgggattctgagcggcaaacataccccgagcgacggggttttgtgaagcaacagatgattaaccttgtggctatacgcatttaatgcttattttatagggcctaagctttgggcttctggccatcttcactgtttcaatggttaacacatgacaaaagaacaattctacgcggaattaaaacgtgacctgagcgcgttgctcggcggggagaccaactttatcgcggcgctgtccaacgccagcgccttgctcaacgagcgtctggatgacgtgaactgggtcggtttctatctgatggatggcgaccaactggtgctggggccgttccagggcaagatcgcctgcgtgcgcattccggtgggcaagggcgtgtgcggcacggcggtggcggaaaatcgcgtgcagcgcgtcggcgacgtgcatgcgttcccgggccatatcgcctgcgatgcggccagcaacgcggaaatcgtgctgccgctggcggttggcggccgagcgatcggcgttttggatatcgatagcacggtttatcaacgcttcgacgaacaggacgaagcgggcctgaaagcagtggtggcggggctttgtgagcaactggaacagtgtgacagtgcgaaatatgtgactgtggcggcaagttgatcgacggttaacgtggcaattaccgatggcgtcattataatgacgcctgttcatgcctgtggcttgttggcaataccgttgtaatcaggaaatttcatggaaaatcaacctaagttgaactctagtaaagaagtcattgcttttcttgccgagcgttttccgctctgctttagcgccgaaggcgaagctcgtccgctgaaaatcggtatttttcaggatttggtagagcgcgtgcagggggaagagaatctcagcaaaacgcaattgcgttctgccctgcgcctgtacacctcaagctggcgttatctgtacggcgttaaagtcggcgcgcagcgcgtcgatctggacggcaatccgtgcggtgaactggaacagcagcatgtcgatcatgcccgccagcagcttgaagaagccaaagcgcgcgttcaggcacagcgtgccgaacaaaacgccaaaaaacgtgaagcagccggtgaatccgccgatgccgctcctcgccgtccgcgtccagccggtaaaaagcccgctgcgcgtcgtgaaggcggagccgcgccggaaaaccgcaagccgcgcccacaaactcgcccacagcccgctcgccaacctcgtgcagccaaagaggaaagccagccgcgttatgcgccagtcacggatatctctaaactgcaaattggccaggaaatcaaagtcagagcaggcaagagcgcgatggatgctaccgtactcgaaatcgctaaagatggcgtacgtgtgcagctctcttccggtctggcgatgattgtgcgcgcagaacacttgcagttctgatacggaggccaacccaggcatgaacaaattcgtcagattaacagcgattgcagggctgctgtgggcgggtgtcagttacggcgcggaaacagccaacatccgcatcggccaactgccccaactgcaacaggaaccccagcacgctacggtgagtgagcgcgttacctcgcgcttcactcgctctcattaccgccagttcgcccttgacgcggagttttcaggcaagatcttcgatcgctacctgaacatgctggactacaaccataacgtattgctggctgccgacgtggcgcagttcgccggcaaacgcaatcaggttggcgaagagctgaaaaccggcaagctggacaccttctacgcgctgttcaatctggcgcagaaacgccgtttcgagcgttatacctatgcgttgtcgttgctggacaagccgatgaacttcaccggcaacggcactatcgatctcgaccgcagcaaagcgccgtggccgaaagacaaggccgagctggatagcctgtgggatgcgaaagtcacctatgacgagctgaacctcaagttgaccggcaagaccgacaaagaaatccacgacacgctgaccaaacgctatcagttcgccatcaagcgcctgacgcaaagcaacagcgaagacgtcttccagctggcgatgaatgcctttgcgcatgaaatcgatccgcacaccaactatctgtctccgcgcaataccgagcagttcaacaccgagatgagcctgtcgctggaagggatcggcgcggtgctgcagatggatgatgactacaccctgatcaactcgatggtgccgggcggcccggcagcgaagagcaaggcgatcaccgtaggcgatcgcatcgtcggcgtcggccaggccggcaaaccgatggtggacgtgatcggctggcgtctggacgacgtggtgtcgctgatcaaagggccgaagggcagcaaggtgcgcctggagatcctgccggccggcaagggcaccaaaacccgcgtggtcaccttgacccgcgagcgcatccgcctggaagaccgcgcggtgaaaatgaccatcaagaccgtcggcaaagagaaggtggcggtgttcgacatccctggcttctacgtcggcttgaccgatgacgtgaaagtgcagctgcagaagatggccaagcagaacgtcaagagcgtgatcatcgatctgcgcaccaacggcggcggcgcgctgactgaagcggtgtcgctgtccggcctgttcattccgagcggcccggtggtgcaggtgcgtgacaacaacggcaaagtgcgcgaagacgccgacaccgacggcgtgacctactacaaaggcccgctggtggtgctggtcgatcgcttcagcgcctccgcctccgagatcttcgcggcggcgatgcaggattacggccgcgcgctgatcgtcggcgaaccgaccttcggtaaaggcaccgtgcagcagtaccgttcactgaaccgcatctacgaccagatgctgcgccctgagtggccggcgctcggttcggtgcagtacaccattcagaagttctaccgcgtcaacggcggcagcacccagcgcaagggcgtgacgccggatattctgatgccgaccggcgtcgatccggcggaaaccggcgaagcgtttgaagacaacgccatgccgtgggacagcatcaatgcggcgacctacagcaagaccggcgatatggcgccgttcgagccggaactgctgaaagatcaccagcagcgcatcgcgcagaatccggagttccagtacatcgcgcaggatatcgcgcattacaaggcgctgaaggataaacgcaatatcgtgtccctcaatctggcggtgcgcgagaaagagaaccacgatgacgatgcgacccgtctgaaacgcatcaacgagcgtctggagcgcgcgggtaagaagccgctgaaatcgctcgacgatctgccgaaggattaccaggagccggatccgtacctggatgaaaccgtgcatatcgcgctggacctggctcatctggaaaaggatcagcctgctcagcagccaacgccggctaagtaaggccacggctttgcctgtgaaaaacgcaccctcgggtgcgtttttttatggttgcggcaagcccggcttaagccggtttcttgcggtgacgcagcccgagctgaatgcaggaaaccaccaccagcagacagccgaacagcgacagcagcagcgggatctcatgccagaacagccaaccccaggcgatgttgaacacgatgccgatatagcgcaccaccgagaccacgatcaggttatcggaagagaaggcctgggttaagacgacctgccccaacagcgacaccagggcgatggcgagcagaatggcgaactgataggcgttgggccaaacgaacgcgttccacatcagcggcagcgagatcagcgttgcgatgaacaggaagtagaacacgatctcgtagttgtggtggcgcttgctgagtttgttgaccgacagataggcgatcgaggcgaacaccgcgctcatcacgccgaccagcgacgccagggtataggccgagaagtgccacggccgcaccagcagcacggcgccgatgatgaccatcgccagccaaaacgcggtattggcgttgacccgttcacgcagcaccagcaaggagagcaaaatggagaaaaacggcgacagataggccagcatgctggcgtcggccagcgtcagatgggcgatgctgtaaaaataacaaatgagatacagcccgcccatggtgccgcgcaacaccagcagcggccggtctacgcggctgaaggcgatgcggtggcggtacatcagcagcagaaccagcagacagccgatgctgctgcgaaaaaacacgatttcaccggtgggaatagcgtcggagatggttttaaccagcgcgttcatgacgctgaaaatcaacgaggcaaaaatggccagtaacacaccctgattcatgcttgcctccgccattgtcggtaaatgatgtccgcctgctcgtcgcaggtatcgtccagcaacgaacgatggcaatgctcggcgccgttccgggtgacgaagcgctgcagcgcctgctgaaagcgcgccaacagacgctgggcggcgggcatctcgacgtcaagccgctgcgccagcaagaccaggacgcgcagtttgcgcacgtcctcttgcggcacgcgcggcaggcgccagcgcccctgggcatcctggaagacgcgggcgaccctgacggcggaaaaatcatagtagcggccctgcgcgtccggctcggaataggggtcgaccagcagcgcggtataacgcgtaaacagcgcatagcattgctccgtcggcgtgagctgcgggaattggtcaatccagcggcggctcaccatacggggcggaaccgggtagttgtcgtcattcaaaaagcgcagcaggttaatggcctcgatgccgagccggttgagcaactgctggtaatcctgcgagagcgccagcatgtcggcgatcgcctcgggacagatggggccctcggggtgggttttatacaggtactggatcggcgcctgcggctggaatatcgcctgcagcgtggtttcggccagcgccagcggaggatgaacataattggtgatgctgaagcgctcggcggcgagcaggctgttgcagcgttgggcgtcaatgccgtgacgcgccagcagcgagcaaagccagtcgagttcggcgcagtctgaccttgcgcctgcgccggccagataaatccgctgcttgaacgccttggtgtaggcgcggtaaggctgttcggcgttctggtacttggtgtcggcgtagtagctcgacaggctgatgacctcgacgtgggattgcccggcgtcctgcagcaggctttgcgccatcaggccggagccgatggagggagagagcaggatcagtgagcgcagttggggcaacgccgcccatggcacctgtcgcagcacgtcatggtattgatcggcggggacggcaaggatcagtcggtgccagtcgccgccgaccagtgacagatcatcgtaatagcgatcaatcgtcacctgcgcatcgtcttgggtgcgctgcgccttaccggcgcccgtcagccacaggctgggcgtgtgcgccagatgttgcttcaggcggcgccctttttcgctggggcggttgtacaggccgatgcgcgcattggccgcggccttgatgtccgcagccagttggatcgccgccgggccggcgccgaggatcagggtgggaaaggcattattcatggcggtggggctccaaaatcaacagatcgtacagcggggtggcgagcggtttaccgctgacacgccagggcgagccggcggcctggtggtggtaagggcagttgaagatcgacttgaggccgttgccatagcgcaccagcaatttgccgcactggggcagcaaaggccgcagcgccttcagcaaaccctgcttgtccgccaccaaagaggcgatgatgatgtgatcgatatcgttgcgcgtcaggccgttcagcttgtcgatgcagggcatctgctgcaccagccccaggtggcgcgtgagccggcgggcaaaacgctgggccgccggatcgcaatcgtagcaaatgacggtggcggagagcctggcgaccagcgccagcgccgtggtgggcaatgcgccgctgcccaccagcagcacccgttcgccgggtttaatgtcggcggccgcgatctccaactgcagcgcgcggtcgaaactgttcaggtaggcgttggtttgcgccggttcccggcacagcgccgagacgcgatgtttctcgtagtcgcacaacgcggcgttggctgtcgcccgcagttgggcgatctgcgccgtgatcaaacggtcgttttccagttttcgacggtaggcctgcagctgtggttcgtcgttaaaggcttgcaggcggctgaagcggcgttccagcagggaaaaatggcgccgatcttgccgggcggagcggtgtagctggtgaatttcctgttgcaagccggcgagttgcgccagcatgtccgccttggtcagagtgtacatggggattctccgtgtgcgtgtaacagctgtgtcggcagcagataggggtagccctgcgggctgacgccgttttcgatgccgacgccaaatacgcgagacaccatcggatgtcccatcatctgatgggtatcgccgtggcaaacgacgcgtccgtgcgcgagcagcgtgagtgagtggcaatagcgcagcgccaatcccagatcgtggatcaccagcagcgtgatgcagcggtggcgccggccatagtcggcgatctgattgagcacgcgcagctggtggtggatatccagtgcgctggtgggttcgtcgagcaaaatgatctgcggctgagagacgaaggcctgagccagcatcaccaactgtcgctggccgccgctgagacggttgaaggggcgatcggcgagcgcggaaatgccgcattccgccagcgcctgttcgaccgcatcggcctgggcggcgctgacgcgccagctcaactgccgtaccttgcccagcagcaccatgtcaaaagcggtcaatgccgaatcgcagcgattaagctgcggcacataggcgatacggctggttttcggatcgagagggcgttcgcggtaagcgatctcgccgctggatggcaccatgcggttaatcgctttgagcagcgtcgatttgccggcgccgttggggccgatgatgccgccgagctgcgcctccggccagctcaatgaaacgtctgtcaacagcgagcggcgatgcagcgagacgccgacgcgggtgagggtcagttgagtcatgggcgtttaacctgtcgagtgacgaagtaaaacagcaccggcacgccgatcagggcgataacgatgccgatgggcaccacgccgttcggcatcaccagcttggcgacgatcgaggcgcacagcagcagcaggctgccgcagagggcggaaatgcagatcaggtagcgctgatcctcacccaccagaaagcgggcgaaatgcggggcgatcagcccgacgaacccgatggtgccgacaaacgagaccgaggcggccgtcagcaaggtcgccagcagaaaggccagcttgcgcaaggcgctgacattgatgcccagcccctgggcctgctcttcgccggcggacagcgccgtcagccgccaggcgagccgcagactgacgaacagtgcgcacagcaacacgacgccggtgatcgccacgccgtgcatattggctttgagcaggctgccaaacagccaaaagacaatttgctgcatggcttccggcgaggccagaaacagcagcagcgattgcagcgactgaaagaaaaacagcaccacgatgccgctcaacaccaatatttgcggcgtcatgccgcggcgttgtcccagcagatagacaggcacgcaggcgagcaacgccatcagcgaagccagcagcggcgtgcccagcgccaacgcgccgcccaggctgaagccggtgaggatcgccagcgccgcgccgaaccccgccgcggcagagatccccagcgtataggggctggcgaggggattagccagcacggtctgcatcagcaggcccgccagcgccaggctggcgccgaccaccagggcggtgagcgtcatcggcaagcgaatcgaccagaaaaccacctgatgcagctcgttgccaggcgcagagccaggccaaagcatccgcacgatatccgtgaggccaagttgcgcggcgccgacggtgagatcgatggcggccgccgccagcagcgcgccgagcagcgccagcgtcagtagcccgcggcgcagcctgcgccgtcgcaaaaacgcacgtcctgtgtgggccacggttattctccttgccagcgttgcaagaagacgccgtccgcctctatcggcaaatattgatggtagaactgcgccagattgcgcgcgggatcaacatcggcaaacgcggtgggatagagcgctttcgccagatactggacaaagataaaatcgtaaatcgtgcgcgcgccgccatggtaaagcgcataaagacgctgattttttatcgccggcagctgcggccatcccgcccgccgggcgtattgcgtcaggcgcgtctggaggggggctgcctgcgtgccgtagcccatcggcacggcgttcggcatgttttcccagtcgccaccggcgagaaaaatcacctcgggccgttgggtcaggacatagtcggcgcgcaagggggaagggctgccgacgacgccggcggcgatattgtcggcgccggccagctgcagcagcggcccccagatcgatgcgccatagctgctgccgtactcgccggggcccttgtcccccagctcaatgtaggtgaccggcggcggcagctgcgcctggcggatgcgccgacgggtatcctcgaggctttggcgatattcgtcggccagccgttccgctcgctcggcgtggcccatcgcctggcccattaaccggatgctggcgagcttgacttcaacgccctgattgaagtcgacgacgatgtaaggaatgttgagctgttgcagcaccggcaggtagttggcgaagccgtcgagctgccacttcgccaggatcagcaggtctggtcgcgtggtcagcaggcgttcaaaatcgaagctctggttatagagcgaaccgacatcgaccagctgagcgagccgtggcagcgccgcctgatagcgcgcccattggctggcgcgcaacgcccagtcgcttttggagaaggcgacgacctgttgataactctccgggccgttcaccgccagaaaatcttcgtagtaaaaaccgatataggcgcgctgtgcgggggcggccagggtaacctggcgtccttcaacgtcggtgaggtgaatttcagcgtgcgcgacctggcagaaaagcagccacgtcgccagcatccagacgatacgcgataacatgattgacatccctttacgattagttgtgatgttataatgtaacaattaatcgcgagattcaaactttcgtcgccgctgaatcaggcggggcatgatgaagcgcgctgagcgtatattggcctataaagcgtgaggataacggttctcgttgtcatggcgtgcggacaaagaaatttttctgcaaaatccctccgccttgcgcaacaatcgtttacaatttgccaaatcccggtcgcgcgtcgtttttgtaaagtttcgtatttttagtaggttaatggcgcgcaactcttgaaactgtgacgaatgcccatacgatccagggtatctggacagtgttttgttaacatttatgaggaagtaaacattttatgatgcgtatagctctgttcctgctcaccaacctggcggtgatgttggttttcgggctggtgctcagcctgacaggaatccaatccagtagcgttcagggcctgatgatcatggccggtctgttcggcttcggcggcgctttcgtgtcgttgctgatgtccaagtggatggcgctgcgctccgtcggcggggaagtgattgaacagccgcgtaacgaaaccgaaaactggctgctggaaacggtgcgccgtcagtcgcagcaggcgggcatcgccatgccgcaggtcgctatctaccacgcgccggacatcaacgccttcgccaccggcgcacgccgcgacgcctcgctggtcgccgtcagcaccggcctgctgcagagcatgagccgtgacgaagcggaagcggtcatcgcgcacgaaatcagccacgtcgccaacggcgatatggtgaccatgaccctgattcagggcatcgtgaacaccttcgtgatcttcatttcgcgcctcattgcgcaggtcgctgccggtttcctcggcaaccgcgacggtgatggcgaaggggaaggcaacggcaacccgatgatttacttcgccgtgtcgatggtgctggaactggtgttcggcatcctggcgagcatcatcaccatgtggttctcgcgtcaccgcgagttctatgccgacgccggctccgccaaactggtgggtcgcgagaagatgatcgccgccttgcagcgtctgaaaaccagctatgaaccgcaggaagcgggcagcatgatggcgttctgcattaatggtaaatccaagtcgttcagcgagctgttcatgtcgcacccgccgctcgacaagcgtatcgaagcgctgcgtaccggccagtacctgaagtaatcggctgaatgaaatgaaaaaccccggcttgccggggtttttttatggcatgcctgaaccgctttttcagcgtcgacgggggttaacgcggtgcaagaaccccccgagtccataaagcccgccttcgaataacgcctgtcggcctctctgtgcgtttaccgccgcggagcgagacgagggtaagccgcatcctggctgagtgacgaccggctgtttggctttggaagcgcatgttatatgctttggcgcaatgacatttgtccctgaggccctatgaaaatcaaccaccttcccttgctcaacggtgatgagctaccggcgcgcctggcggaattgacaggcggtatcgccgatgcggttgcggaactgttcaaccggcatgatgacgatgctgaacggccagctattcgctggcattcaggcgatcttcacctcccggcatttttccccgacgagcacgacagccacgattacgattacctgatcgtggacggcgatatgatcgtggaaggatgcctggcggtatcgccgcagcgcgaggacggcggcattgtcgtgctggggcggctgcaggcggatacgctgatttgctggggcggactggtcgtgcgtgatgatgtccgcatgcgccatgcctattgcagctcaggaaacgacggtgcgttcgtggtggggggagatctgaccgcgctcaccctggtagagacgggggagtttatccatgtccatggcgatctcgatgcgcggtgtctcgcttcgttgcagaacttcgttcaggttgacggaaacacgcgctgcgattgccgcatcgatagcgctcaggccgaagatctgatcaagcgcatgttcgcccctggcttactgaagggcttcgagggggtggataacgacggccaacgcattgttggctggtatccggatgacgacgcctatttagcgtgtctacgacaaggccgcagccctttgaggagcggcgactgacgccaggcctgcatcgcgctcgacgtggcccggctcaggcaggccacatcggattggggcgcggctctttctatgccctctatttcacctcgcggctgggctgcgccgtttgcgtcgtcggttgagtgatgcgcaggctgctgaccgccgcagccagggtggcgaacaccccagccaggatcagtgaagcgtgggtgccggaggccgggaacaggttgaacatcagcgccaccagcgcggctcccgaggtttgccccagcaggcgagcggtgcccagcatgccgctggcgccgccgctgcggttgcgcggcgcggcggagatgatggtgtggttgttgggcgactggaacaggccgaaaccggcgccgcacagcaccatgcgccagatgatgtccatattcgacggcgccgccggcagcagcgccagcgaaaacagcccgagcgcgaacaccgccagcccaatgcagcccagcaggccggcgtgcacgcgctccaccagccgaccggcgatcggcgccatcaccacgatcgccagcggccacggcgtcagcagcagcccggtcgccacctcgtcgcggcccaacgcgctttgcaggaagaacggcaacgacaccatcgccagcatttgcgcggcgaacgaacagattgaggtgcccatcgacagggcgaagatcgggatacgcagcaggtcgaccggcagcaacggaaattcctggcgcagctgacggcgcacgaacaccgcgccaatcgccagcagtgcggcgatttcgctgaagatcagcgtcaggctctggccctgggcgaagccgctgatggcggtgatcagcaggccgaaggtcaacgcgttcagcacggcgctggtgggatcgaaacggcggttatcgcttttctggccgttggccggcaggaatttcatccccagcagcagtgcgacgatgccgatcggcaggttgatggcgaacagccactgccaggatgcgaccgacaggatcgccgccgccaccgtcggcccggccgccgaggagcaggcgacgatcagcgagttgatgcccatgccgcggccgagaaaacgctgcgggtagatgatgcggatcagcgcggtgttgacgctcatgatggcggcggcgccaaagccttgcaatacgcgggcgatggtcagcgtgagcagcgagtcggacagggcgcaaaacagcgaggtgatgctgaacaccagcaatccggcctgatagatgcggcgatagccgaccagatcgccgagcgaggccagcgacagcagagagacggtgatcgccaactgataggcgttgaccacccaaatggagctggccgggctggcgttaagatcgcgcgcgatggtgggcagcgccacgttggctatcgcgccgtcgagcaccgatacggtaatgccgagggcgatggcgaggatcgccccatagcgttgcgggacggggaggccgtcggaacaaggacgcatgttggtctcagcggtgtttattcaggggagtattatcatgctaatcataatcgcctgcgattgcatgcccgttgcccgcttaattgtaaatagcggtgagcgggccggggttatccatttggcttcaatcgcttagcgcccatgtgcgttgcgcgtcgcgatctgttccgattatactgaaacccttgtttaaatttcctgaaacaaaaccgttaagtagggcattcaccatggctaacgcagattcagacaagcaaccggatgccgtctcatccgtgatgaaagtgttcggcattttgcaggcgcttggcgatgagcgcgagattggcattaccgagctgtcccagcgggtgatgatgtccaaaagcaccgtctaccgttttctgcaaaccatgaaagcgttgggctacgtatcgcaggaaggcgagacggaaaagtatgcgctgacgctcaagctgttcgaactgggcgccaaatcgttgcagaacgtcgatctgatccgcagcgccgacgtgcagatgcgtgaactgtcgaaccgcacccgcgaaaccatccacctcggcgctctggatgaggacggcattgtctatatccacaagatcgacgcgatgtacaacctgcgcatgtattcgcgcatcggtcgtcgcaacccgctgcacagcaccgctatcggtaaagtgctgctggcctggcgcgatcgggaggaggtggcgcagatcctgtcgcagattgaatttacccgcagcaccgagcataccctgaccagcgccgccgaactgttgccggtgctggatcgggtgcgtgagcagggattcggcgaagatgtcgaagagcaggaggcggggatccgctgcatcgcggtgccggtctttgacaggttcggggtggcgatcgccgggctgagcatctctttcccgacgctgcgcttttccgacgcggcgcgggaggagtatgtggcgttgctgcacgtcgccgcccggcgcatttccgagcagcagggctatcacgactacccgttctgaccgtcatttcgatgagcgaggcgctgccatggcagcgccttgttgttatttcgcgccgggcgtcagccgctgagaaatccgctccagcaccagcatcagcaacagcgtggccgccaccaggatcatggtcagcgtcgcgccgttggcgatgctgccgcgatcggtcaggctgaagatcgtgaccggcagcgtcgcccagctcggcgggtagatcatcatggtcgcgcccagctcccccatcgacagcgacaggctgagtgcgaaggcggagatcatgtagggggcgatcatcggtagggtgacgtgacgcaggcggaacagcggcgaagcgcccaggctggcggcgacgttctcgtagtcgccaggcagccgggtcagcccggccatcacgttgccgaaggtaaaggcggaaatcagcacgaagtgggcagcgggcacgatcaggaaggtgccgttcatctgcagcggcccctggctgaacgccaccagcatccccaaaccgatagagaccgaaggcaccgcgctgggaatgaaaaacagcgtgcccagcagccgctggccgcgcccctgatggtggcgcagcgccagcgccgcccaggtgccgcacagcagcgcgaacaggctggcgctgaaaccgatagccagactggcgaccagtgcgtcccaggaggcgccgctgaacgcctggcggaagtggttgagggtgaagccgctcggcagcacgccgttccactgctcactgaggctggacatcaggatcaccgccagcggcaggcagaagaacagggcgaacagcgtgaccgtcagcgtgcaggtcagggtgcggctggtgcgagaccaaatcaacatcgtcagttcctcagcccggcgcgcgccgcggcgtagcggtaaagggagaacagcccgagcgacagcgcgatattcaccacggcgatggtgcaggcgacggcgtaatccgcctccagaatcgctttggcgtagaccatcatcggcagcgtggtgacgcccttagcgccgataaacagcacgatgccgaactcattggtggtcaacagcaggcacaggctgccgccggccagcaaggccggcagcgcggccggtaaaatcacctggcgcaccacgcgccccggtcgggcgccgaggatgctggcggcctcgagctggctgcggtcgatctgcgccagtgccgccatcagcgggcgcatcaccagcggcgtaaacacggtgatttcggccaggatcacgccccagatggagtaaagaaagtccaccggcggcagggtgaaaccaaaggtcgccatcagcgtgccgttcagcaggccggcggagccgtagataaaggtgaaggccagcgtgatgaggaaggtcggcatggcgataaaggtatcgatcacccgggcgatcagtcggctgccggggaacggcgtgaataccagcagcagcgacagcagggtgccgagcaccaggcagcccagcgtcgccagcagcgcaatctgcagcgtgttgagcagagcgccgacaaagcggtgggattcgaacacctgttgcagcgcggcggcgctgaatagcccctgatcgtcggtaaacgcctgtttgacgatcagcgccagcgggtagaaaaacagtgtcgccagcaccagcagcggcaacaggatccacaggcggcgcggcaaacgcagccgcagggccgggcgaataagcgtagagtcggtcatgtcagtcctcgatcagtaccgcatcgtcgggggcgaagtagagcggcacgcgctcgccgatctgcggcatccggctgcgatgagtggtgaccacgcgcagcggatggccttccgcgtcgaactgcaggtgcgtcaactctccctgccaatgaatatcatgcagcgtgccgatgatgcagttgctgcgctgggcatcggcatcgagcgcaatgtgctgtggcctgatgcacagcagcttgtcgaagccgcgttgtgcgccgtaagtgaaacagccgatcactttgccggcgcagctgacggtggtcatgccttgctgcgcggtagtttccagggcggtagccggcagcaggttagcgcggccgaggaactcggccgcgaagcggttcgtcggatgatggtacagcgcgcgggtttcgccgtgggcgatgagatggccgtcgcgcatgatgccaatcttgtccgccagcgtcagcgcttcgccctgatcgtgggtgacgtacaggatggtcagatccggcagctcgcggtgcaggcgtgcgatctcttccaccatgctgtggcggatttgcgcgtccagcgccgacagcggctcatccagcagcaatactttggggcgcaccgcgatggcgcgggcgatcgccacccgctgttgctggccgccggagagctggttgggatagcgcttggcgtaggcggacatgccgacgatggccaacgcctcttcgacgcgctcggcggtcaggccgcgcggcttgccctgcgcgcgcaggccgaacgccacattgtcctcgacgcgcatatgcggaaacagcgcgtagttctgtaccaccatgcccaggccgcgctcatagggcggcacgtcggtgacatcgacgtcaccgatggcaatacgcccggcggagggctgcacgaagccggcgatcgctcgcagcacggtggttttacccgagccggaggggccgatcagcgccagcacttcgccgggggcgatggtgagcgtcaggggtttcagcacctcggtgccgcgatacgacacgctgacgcggtcgagctgaatgcccgacggcccggcgatgtcccggctgctatcccgcgcctcggcgcgggaagtgagggtagaaggcatggtcagcgtcattctgtcaccttgtgccagcgggagatatcggcggacaggctgctcaccacctggttccagtccggcgcccagatctctacaccctgcagcgcggcctgcgactgcctgaagttatcgtcggtcggggtgacatccttacgcaccggcatgccgtaggaaatggcgctgacgctgctctgcgcttctttgctcagcaggaaatcgatcagttttttgccgttggcgctttgcggcgcgccttgcaccaggccgatgtagtaaggcagcaccagcgtgctgcgtttgccgtccggcccggccggccagaacaccttgacgttcgggttgctgcgcatctgcgccaggttcatctgcagatcgccgttggccaccagcagctcccccttattgaccagcgcggtcagcttgccggtggaggccgaagggccgacgttgttgctttgcagcttgccgaggtagtcgaaaccggcatctttgctgccgaagctgtgaaacgcctgcagcatcactgcggtgccgtcacccgcctggcccggcgtggagtactgcagcttattgcggaactgcgcgtccagcagctgttgatagctggcaggcgcctgcggcagcagtttggcgttatagatgaagctcaggtagttgttcaccagtggcacgaactgcggctgggcgtcggcgatctgcgccgcatcctgcggggtgaaatcctgcagcagtttttccgcggcggcgcgctggatgaacggcggcagcgttaccagcacgtcggcctgcgggttgctgcgctccttcgacaggcgctccacgatggcgccggagccgccttcgacgtactgcaccttgacgccggtcgcctgggtgaaggcgtcgaactgggtttgataccagctgtgatcgccgtcgtgcagaccatcggcggagtagacggtcaccaccgcatcggcggcccaggccggcgcggcgccgagtgcgatggcggtcatcacgaccagacgagaaaatttcatagcttcagcctcactgttgcgggttaatgcgaaactggtatacaccagatatgcggccaagctaatcggcaaatatgacaaacaaatgaaagcggcaaaatatatttgccttaaaagggggatcgagcgtgggtgaggaaggcggggcggcgggcgccggccccgtgataatcgaggttagagcgtatcgacttcgatgcgcaggctgtcgtggcgccagtattcaatatcgaaatcgaggatgcggccgtgctgatcgtaattcagtcgacgcagcagcaacgcgggcaggccgaccatggcgccgagcgcgttggcggcgcggtaaggcagggcggtcgggtagaacgacaggtgcatgttgctgtaaatcaaatcgtaatgctgttgataaacctcggtcaggctgccgttgagatcgtgactgagcagttccggcacccgctgcggcaggcagtggttctcgcaatagcagatggcgcggccgtcggcatagcgcacgcggcgcagcagatacacctgatcgaacggttcgagcgccagcggctgcatgacgtcgagcggcacagtggttttttcgccggacagcagagcggtgcgcggcgtgcgcccttgctcctgacagagacggtggaagttggtgttctgcgtcggatccagccacagccgttccggcgtgacgaaccagccgcggcgatcggcgcggtagatggcgccggtggcttccaattgcgccaggctttcgcgaatggtgacgcgggtggtggagaagatggcgcacagctcgcgctccgaaggcagcttatcgccggcctgcagcgcgccgcgggtaatgcgcgcctggagctgatccttgatctgcaggtagtgaggcatatcgccctgatgttctttcatttcatctcgctatggcatcggcccgacattccggcacgcgcttattatacatagccagatgaattttttgtttcaccgcgctttgtcgtttgaccggggcaggaatttgccgccacaatgatcgcaatctggtatagaccaataggtgaataacatgtccgatcgtaactacctgctgttgacccccggcccgttgaccacgtcgaaaacggtgaaagaggcgatgctgtatgacagctgcacctgggatgaagattacaacctcggcgtggtgcagcgcattcgtcaacggttggtggcgctggcgacgccgtctgccggttatacctcggtgctgctgcaaggcagcggcagcttcgcggtagagggcgtgctgggcacggtcatcggcccgcacgacaagctgctgatcgtcaacaacggcgcctacggggcgcggatgatcgaaatggcgcggctgatggatatcgaccaccacgctttcgactgcggtgaggtgaatgaaccggacgtggcggcgatggaggcggtgctgaaaagcgatgcgcgcatcagccatatcgccatggtgcactgtgaaaccaccaccggcatgctcaatccgctgcagaaggtcgctggtctggcggcgcgcaatggcaagacctttatcgtcgacgccatgagcagctttggcggcatcccgttggatgtggacgcgctgggcatcgattttctgatcagctccgccaacaaatgcattcagggcgtgccgggcttcgcgttcgtcatcgcccgccgcagcgagctggagaaatgcgccggccgttcacgctcgctgtcgctggatctgtatgctcagtggcgctgtatggaggatcaggccggcaaatggcgctttacgtcgccgacccacaccgtgctggccttcgcgcaggcgctgaaagagctggaacaagagggcggcattgccgcgcgccaccaccgctatcaggccaatcagcggcggctggtggcgggtatgcgcgagctgggttttgagaccctgctggacgatgcgctgcactcgccgatcatcaccgcgttctattcgccaaaggctgatacataccgcttcgccgagttttatcagcgtctcaagcaacaaggcttcgtgatttatcccggtaaagtgtcgcagagcgactgcttccgtatcggcaacatcggtgaaatctatccgcaagatatcgaacgtttgctggcggccgtcgggcaggcgatgtactggaatcaataaggattgaccatgaaacagatcaacgcagtaatcctcgactgggcgggcaccacggtggacttcggctcctttgcgccaacgcagattttcgtcgaggcgttcaagcaaaccttcgatatcgacatcagcctggcggaggcgcgcattccgatggggctgggcaaatggcagcacatcgaggcgctgggcaagctgccggcggtcgacgcgcgctggcggcagaagctgggacgctcgatgagccatcaggacattgacgcgctgtatcaggcgtttatgccgctgcaaatcgctaaagtgatcgacttcgccgatcccatcgagggcgtgccgcaggcgatcgccgctctgcgcgaacagggcattaaaatcggttcctgctccggctatccgcgcgcggtgatggaggtgctggtgcccgccgccgcgcagcgcggctacgcgccggattactgggtcgccaccgacgatcttgcagccggcggccgaccggggccgtggatggcgttgcagaacgcgatcgcgctgggcatcgatgcggtggcgcattgcgtgaaggtggatgacgcggtgccgggcattgccgaagggctgaacgccgggatgtggagcgtcgggctggcgctgtccggcaacgagtttggcgccacctggcaggagtatcgccaaatgccgcaaggggagatcgagcgccgtcgcatggccgccgccaataagctgtacgcggcgggcgcgcactatgtgatagacacgctggcgcaattgccggcagcgatcgctgatatcaaccggcggttggcgaacggcgagcggccgtaacgaccgaacgcggggcgtaaaaaaaccggggattatccccggttttttcgttctgagacggcgttagcgatgcgctaattcgacttcgtcttcgctgtccatcacggctttgtcggtttgcttcatcagctggctggtgatggtgcccgccgccatggaaccgttgacgttcagcgcggtacggcccatgtcgatcagcggttcgaccgagatcagcagcgcgaccagcgtcaccggcaggcccatcgccggcagcacgatcagcgcagcgaaggtggcaccaccgcccacgcccgccacgccggcggagctgatggtgacgatgccgaccagggtggcgatccacaccggatccagcgggttgatgccgacggtcggcgccaccatcaccgccagcatcgccgggtagaggcccgcacagccgttctggccgatggtggcgccgaacgatgctgagaagctggcgatggattccggcacgcccaggcgacgggtctgcgcttccacgttcagcggaatgctggcggcgctggagcggctggtgaatgcgaaggtgatcaccggccacaccttgcggaagaacttcatcgggttaacgccggtgaaggccagcaggacagcgtgaaccacaaacatgatggccaggccgatgtacgaggccaccacgaagctgccgagcttgacgatatcgtgaatgttggaaccggcgaccactttggtcatcagcgccagcacgccgtacggcgtcagcttcatgaccagacgcaccagcttcatcacccaggcctgcagggtgtcgatagccaccagcacgcgctcgcctttcggcttgtcgtctttcagcagctgcagcgccgccacgccgaggaaggtggcgaaaatcaccacgctgatgatcgaggtcgggctggcgccggtcagatcggcgaacgggtttttcgggatgaacgacagcaccatctgcggcaccgtcagatcggccagtttacccacgtagttggtctggatcgccgtcaggcgcgcgctttcctgcgcgccctgcaccaggccttcggcggtcaggccgaacaggttggtgaccagcacgcccaccagcgccgagatcagcgtggtgaacagcagcgtgccgatagtgaggacgctgattttgcccagcgaagaggcgttatgcagcttggccaccgcgctcaggatcgaggcgaacaccagcggcatgacgatcatttgcagcagttgcacatagccgttgccgacgatgttgaaccagctgatggattctttcagtaccgggttatcggagccgtacaccagctgcaggcccagaccgaacaccacgccgaccaccaggccgaccagcacttttttcgccaggctccattgcttgtggcgggtttgcgccagcagcaaaaggagcgcgacaaacaccagcacgttaatcacgagcggaagattcatccccaatgtctccaataatctttcttataaaaacgactacgcatcacgtatgtcgcgatgtaaatatcgtaacagtttgctgagtggcctacttatatccaaatggaatttgatatagctttttgtgtgtttttgttcgttttatatacatcaaggtgatgtgttaggcggttttttgtgatcagagtctgatatttctgatttgctcgacataggattgcaccggcagggtgaaatcaccttgccagcagatggcaaacgccaccaggcacagacacagcacccgctccagctggttgcctttttgcgagttgagcagcggcaggcgaaaacgccagcggcatggccacaacagcggcacgccggcgggggtgagcatatcggccaacagatggctgaagtagccgatgatcatggcgtgcagcgcatcggccgggatcggccagctgcgcggtacgtccagttggaacagcgccatgccgccggcgatcgccagcaggctgtgggtgaaaccacggtggccgaaggcgcgggcgatgggcagggcaatccagcgcaggcgctggcccagcaccgacttggggtgatcgatgtccggcagcagcgaggtcagcagcgcggcgggtatgatgtgccaccagtcgccggtagccagctctggcgtcacttccgccttcttggcgaagatcgcgcaagcgacagagaatataaggtgtccttccgcggtcatgctgttgcgattccggctggtaaactgttaatttatccagtatatgggaaaattcccagtagtggaagcagttaccctgtaaccaattgtttattttcccctgttttacaacggcttgttacggcaatgggtaacaaagcatcgattttgacgggcgagaacaaaaagcgggcaatgggggagtgaaacggaaagcaacgagcgcggttttacggcgtgcggcgggaggaagcggcggccttgaagcgcgctgcgtggcagtgacaacgcgctgcgggccgtcgctttccctgccatgcagcataatgagaacgtcacgccaattcaataaaatgaaacggtgtttcgtttattttgcggttcggatcccttttatgccgcagggcgccggtgcccggcgccgcagaatcaggcaaagtgggcaggggtgagctgttcgagggtctccaactggtgatccgccagcgcccagcgcgggtcgtggcggtattcggcggccgggatcacgatggaacgcatgcgcgcggccttggtggcgatcatgccgttaaaggagtcttccagcgtgatgcagcgcagcggatctctgcccaggcgttcggcggcgatcaggtagacctccggatgcggtttgctgtacggcaggtattcggcggaaaccaattgatcgaagtagccttcaagatcgaacatcttcagcacctgccgttgcatgtgcagcggcgaggcggaggcgagaccgatgttcagtccctggctgcggcacagctccagcgcctgccggacgccaggcagcagcgggcgcgtctcgtgcaccagctcgatggcgcgctcgataatccgcgccgacacctcttcaagcgtaaccccttgccacggcatcgcctggtaccacattttcaccaccagatcgatgcgcagccccagcgtgtccggcagcttgtgacggtcggacagatccaagcccagcgcgccgaagatatccagctcggcctgcagccacagcggttccgagtcgatcaacaagccgtccatatcaaaaattgcggtttcaatgcgttgcgaataagccattagcggttaactcctgccggcgcgggtgaatgtgcccgacactttatcatcgccggtgacgagactaaaacctttgcctgcgcgtgtggcttttgccaaaacgcaggatattccacacctcgcgcaattttagccaccagcgctggtgttgacgctcggtgacctgttgcaacatgcgcgcataatccagcaccaaccccggcgtccaggtcatgctttctccgcggctgcgcagtaccgccagcatccacaggttgggatccagcaccagcagcagaaaacggcgccacagatgtttatcgcccagcacgccttccaacgcgctgtcgagcgcgccgatgaccgtggtggagcagttgcgccgggtcagattgtaggtggcgtcctgccgataacgcagccagaatgcgcgcagcgccgccgggttatagcggtagaattgaattttcttgtccggtgggcaccaggcggcgatctcgcccgccaggtcgggcaggaaacgtccgtcgacgttgttctgttcgccggcgtgcagcaactgacggaaatcctgaacggaatggctgatgtcgttgagtgggtagtggctgatatacacatccggcgcgagcgccagggcggcgtgaccggtggagatattgccgccgccgtcgaccgccgcgatgtatcggtcgacgatgtaacgccggcgcggatctttagccgcgccaatcggtgtccagacatacaccgtgagcggcgcagtctcatccgccggggaggatggctgccgcgcggggtgctgattcagagagaagtttgtcagtctgcgggcgatacgcaataaagcccagccggaaagcaccatcatcacgccgaggcaaaagggcaccgtcatccggtgaggcgccggccagccgataaagatcatcaacgaaagcaggatctcgccgccgcccgccagcgccacgcctttccatcgactgtgctgaatcaccgtggaggaggcgatgcgcacggcgccgtcaagcagcagcgcgctgccaaacaccacggtggcgacgatgttatcgtctgcgggcacgtccaacgttaaaaaggccataaagacaaaacccaatcctttcagcagcaccggcctgctggccgaagagccgatcaccagcgcggcggatatcgccaccagcccctccagcgccaggatgaccgccagcgcatccagcgccagcaccgaccggccatcctgcagtatgtcgaacagcatcagcgcccctgcggctatccacagccaaccgaacagcaccagcaggcggcgctggccgtgcagcgcctgcgcgcccagcaataagataatcagtcgaatcatggcggcctctggctaaacggataacgttatctcttcaatgatagtgcccggatgtcgttaagcagttgatttcggcgaattcggctaagcttgtagcacagcgggaatgaagaaaacggtgggcgagtttcgccaactgcaggtagacttagccgattcggttacgtcgctaacaaggggaacacatgacgtatcaacaggccgggcgtatcgccattttgaaacgcattctcggatgggtggtttttatcccggcgttgctgtcgacgctgatttccgtgctgggctttatctatcagcacagtgaaaaaaccaagggcatcaacgcagtgatgctggattttgtccacgtgatggtggacatggtgcgtttcaatacgccgttcctgaaccttttctggtacaactcgccggtgccggacgtggataaaagcctgttcagcggcgccaatttgatgttcatcatcatctatatattgatcttcgtcgggctggcattgcaggcttccggcgcgcgcatgtcgcgtcaggtcaagttcattcgcgaaggactggaagatcagatgatcctggagcaggccaagggcagcgaagggcacacgcgtcagcaactggaggaacgcatcacgctgccgcaccacaccattttcctgcagtactttccgctgtacatcctgccgatcgtgattgcggtgatcgcctggttcgtgatccgcctgttggggcagttggccggcgcggcctgaaccctgaacggggcgccgagcggcgccccggaacgttatgacgcttccggctgcaacagcgcctccaccgcacgttgcgcagccaccaaatgctggccgccgaacaggttgctgcggttgagcaggtagtacagctgatacagcggctggcgctcgataaatccggcccccagcggccacacgctctgatagccgtcgtagatctgcggcggcagctccggatacagcggcagcatcgccaaatcgcactctctgtcgccccagtagctggccggatcgaacagtatcggcccgtgggcggtcatcgcgcagttgcccggccacaggttgccgtgcagcagggaaggctgcggctggtggtgctgcaagcgcagatacacccgatcgacgatgtcgtcgatgtcgccgaaggtcatgcctttttccgccgccagctgcagctgccagccgatgcgctgctcggcgaagaattccgaccagcggcgttgccaggcgttgggttgcggggtggtggtcagatcgctgtcgaagtcgagaccgaactgcggttgctcgctccactggtgcaaatgcgccagttgttgccccaggcagtaggcgccgtgagcatcgaggggtttcagctgctgatactccagcagcaggaagctgtaatcgcgatcgctgccgacgccgtacacttccggcacccgcacgcttttgctgcgcgccagcaacgccagctgatcggcctcggcggtgaatatcggcagttgttcacgggcgtcgcatttcacgaacacctcgttgtcaccgtaactcacgcgccacgccgggtgaatgtcgcccccgggcagttcaatcctttcgcgtatctctgcgctgccaagatgttcacttaacagacggctaacggcttgccacatggtatgtccccctctgtgctgcctgataattcattaggttagcgtctttcccgtggtgaaaacacgacgcggcgcacagccggcgtcaaaggcggcgattttttcagcgcctcgccagctcaaagtatataccctattgattaatttaagcgcaataccgattgcaacttgatgacaacggataagcgaggggaggataagatgcggcggagagcaccgccgcatcagagaggcgtttaactgccaatgggggcgttttggttaccctgtaacggacgcagcttgctgtacaacaaggcgatcacgaacagcgcggcctgtacgatgacgatgcaggggccggtggcgccgtcgatgtggaagctgatcagggtgccgagcacgcaggagaacaccgacaccaccgtcgccaccatcagcatgcggtcgaagcggcggcacagcataaaggcgatgatgccgggggcgatcagcatggcgatcaccaggatcacccccacggcctgcagtgaggcgacgatggtcatcgccagcaggcacagcaacccgtagtgcaacagcttgaccggcaggccaatcacccgcgcatggtgcggatcgaagcagtacagcatgaagtctttgcgcttgagcagcaccaccgccagggtgatgccggcgatcagcagggtttgcttcagttcgccgtcggtaatgcccagcatgttgccgaacagaatgtggctcaggtgctggtcggtatcgatgcgcgagaacagcaccaagccgaaggcgaacatgccggaaaagacgatgcccatcaccgtgtcctctttcacccggctgttctctttcaggtagccggtggctaccgcgcagaagatgccggagaggaaggcgccgatcgccagcgggatgccgaccacgaacgccactacgatgccgggcaagacggcgtgcgagatggcgtcgcccatcagcgaccagcccttgagcaccagatagcaggagagcacggcgcacaccacgccggtaacgatggcggcgacgatcgcccgctgcatgaacgggtaggcgaagggttcgctgagcagttgatacagggtgtccatcagcggcctccggtttgcgaatgtgccacgcggcgccgggatgccagcaggccgtgtttcggcgcgaagaagaacgccgccaggaataccagcgtttgcagggtgacgatcaccccgccggtggcgccgtcgaggaagaaactcaggtaggcgccgatgccgctggtcaatgcgccgatgatgatggcgataatcaccagccggctgaagcggtcggtcagcaggtaggcggtggcgcccggggtgatcaccatggcgatcaccagaatagcgccgacggtttgcagcgcggcgacggtgcaggcgctgagcagggtgaagaacaggatcttcagcttcagcggcgacaggccgatcgacaccgcgtggctttcgtcgaagaacaccgccagcagatctttccacaccaggcacaggatcagcagcgaaacgccgatgatgatttccacctgcagcacgtcttcgtcggcgatgccgaggatattgccgaagatgatcgactgtacgttgaccgaggtggggttgagcgacacgatcagcaggccgacggcgaagaaggtggagaagataaagccgatgatggcgtcttcgcgcagccgggtgatgtggcgcaccagcgtcatcgccagcgccgccagcatgccggtgaagaaggcgccggcggcgtagggcaggccgagggcgtaggcgccggccacgccgggcaccaccgagtgcgacagcgcatcgcccatcagcgaccaccctttcagcatcaggtaggcggacaggaacgcgcaggcggcgccgacgatggcgctgacccagatggccttcaccatgtagttgtaactgaaaggttgcagcagaaggtccagcatcaggattgtttctccctggcctggctgttggccggcggatcgcttttggtgtggccgtagaacaccgccgggcgttcatcgtcggtcaacaccgtgacggtgcgcggatcgttgtcgtcgtgcagatccgggccggaaaggttgatatggcgcagcacgccgccgaacgcctgctccaggttgctctgtgtgaaggtggtctcggtcgggccggcggccagcaccgtgcggttgatgaggatcacccgatcgcaaaattccggcacgctgccgaggttgtgggtggagaccaaaatgagatggccctcgtcgcgcagcgcgcgcagcagctcgataatcgcattctcggttttcacatccacgccggtgaaaggctcatccagcagcagcaccgtgccctgttgcgccagcgcgcgcgccagaaatacgcgcttcttctggccgccggacagctcgccgatctgccggccgcgcagctcgctcaggccgacgcgctccagcgccttgtcgacccgcaacctgtcctcacgtgacggaatgcgcaggaagttcatcttgccgtagcggcccatcatcaccacgtcttccaccagcaccgggaagttccagtcgacgtcttcggtctgcggcacgtaggcgatcaggttctttttcagcgcgtccgccaccggcttgtcgctcagcgacacctggccggcggtgggcctgaccaggcccatgatgcttttgaacagcgtcgacttgccgctgccgttgacgccgaccagcgcgcagatcgaaccgccgctcagggtgaagctggcgttgtgaatggcggtgtgcccgttgttgtaggttacggtgacgtcgtccacgttcaattcagggcggacaaacggttcatgggtcattgatcgaatcctttggcgatggtttgcacggtggtgttaagcaggtcgatgtaggtcggcaccgggccatcgcgggtggacagcgagtccacgtacagcacgccgccgtatttggcgccggtttctttcgccacctgcctggccggcttgtcggaaatggtgctctcgctgaacaccaccggaatatggtgggcgcgcacggcgtcgatcacccggcgcacctgctgcggcgagccttgctcatcggcgttgatcggccacagataaacctctttcaactgatagtcctgcgccaggtagctgaaggcaccttcactggtcaccagccagcgctgtgcggccggaatgcgcgccaggcgttcgcgcagcggggcgtccagcgcgccgattttctctgcgtaggccttggcattgcggttataggtttccgcattggccggatcgtgctccaccagcgccttgcggatattctcgatatacaccagcgcgttgcttggcgacatccaggcatgcgggttcgggttgccgttatagggcccttcgcggatcggcagcggggtaatgccttcggtgactaccgccgccggcacctgtttgatgttttcgaagaaacgctggaaccagcgctccaggttcatgccgttccacaggatcaggtcggcgtgctgtgccttgacgatgtcgcgcggagtcggttgatagtcgtggatctcggcgcccggcttggtgatggattccaccacggcggcgtcaccggccacgttctgggcgatatcctgaatgatggtgaaggtggtcaccacgcgcagctttttttccgccagcgcgttttggctgaccaaggcggcgccgagcagcaggcaggcgagcgtgaaagggcgtaacaatgcagcagagcgggaagggcgactgcgacgaaaagcgcaacttatcaatggcatgatgacgtctcctggttcaaatgaaaatgattatcaatatcaattgaagcgaagtcaagcgccacttgcccaccgccggcggggtatttctccaactgaaaaataataccgtccggggagttatagcattttatgtatcagtatgtaaccgctgaaggtagtcctcacagctgcatatcgccacctccggctgttttcccaatgccaactgcccgaacccctgcgccaggcgcagtacatcctcttgatccagcacagttatgaacgcaaaactgttgctgccgagttcgtggtgaacgccattttcgtctgtcaccgacgtgacaaaaccctcgcgcgtcaattgcccggtcagcttcgccaggtcggttaatccctcttcctgatagcgaaaagtcaccacaaagcagcttgttgcagattgactcataaatcacctcttggtatatggatagcttgagattagcccaaaaaattactgcaggtgtccttacaagttgtatatgctacgcaactcattgaaaggagtgagggattctgtgaaaacaaaaataggttgccttacggcaattttacttttgtcggggtgcgccaaagacccgcaaacggcaagcaatatttcaggcagtggcacaacgcgcggcggttggttaaaaccccctccgcaggcaccggtaaaccgcacgggcaccccggttgcttataacgattacattcgtcaggcggccagcaactatggcgttgacgaaacgctgattaaagcgattattcaggtggagtccgggtttaacccgaacgtggtcagcacctcgaacgcagtgggattgatgcagcttaaggcttctaccgccggccgcgacgcctatcgcatgaagggacgaagcgggcaacccagctcgcgtgagctgaaggatccggcggtcaatattgatctgggaacggcctatatcaatattcttcaaagccagcagctagccgggatcaacaatccacagactttgcgttacgccaccatcgtttcgtacgtgaatggggcgggtgccatgttgcgcaccttctcctcggacaagcgcgtggcggtcaatcgcatcaatcagatgagcccggatgagttttatcagcacatccagaaaaagcacccggcaccgcaggcgccgcgctatttgtggaaggtgaccaccgcctatcaggcgatgtcgcagtaatcctctcttttgtcgaatcggccgctgaacgcggccgattttgttttcggcaccgttccagcgcgcgacccacctctcatttttcgttatttcctcaccgcttatcggaaaaaccgcacaaaaagttaaatttacgttagcagataaatctttacgttcattcaataagttaccggtaacatttttgcttttgtacgcattctgaccttcaataaatatacaaataagtaacaaattattttaaaaacccgtatcgatcgcaaggttgcggttaaatagttgtgactatctttggatggaatgtgacatgtcgaatcataaaaccaacaattcgcggcgcgatttcttgttgaaatcgatgaccttaattcctgcggcggtaattggtggcagcggcgttggcgcgctgacggcaccgacaccggcggtcgcagcctcgaacacctcaacgcagaacgattaccaaccgacctttttcaccccggaagagtgggccttcatcaaggccgccgtcgcgcgcctgatcccggccgacgatcgcggccccggcgcgctggaagccggcgtgccggagtttatcgatcgccagatgaataccccgtacgccaccggctccatctggtacatgcaggggccgttcaaccccgatgtgccgaaggagatgggctatcagctgccgctggtgcccaagcagatctataacctcggcatcgcagacgccgacgcctacagcaaaaaaaccgccggcaagcctttcgccgaactggatggcgcgcagcaagacgccatgctgcaaaagttcgagtccggcgaggcggagttccagcagctgccgtcgaaactgttcttctcctatctgctgcaaaacacccgcgaaggtttcttcagcgatccgatccatggcggcaacaaagacatggtgggttggaagctgattaattttccgggcgcgcgcgccgattttatggactgggttgagcgaggggagcgttatcccttcccaccggtctcgattcgtggggagaggggctaaccatggcaacggtaatgaaaaaagtagacgcggtgatcgtcggcttcggctgggtgggcgcgatcatggccaaagagctgaccgaggccggcctcaacgtggtggcgctggagcgcggcccgatgcgcgacacctatccggacggttcttacccgcaggtgatcgacgagctgacctataacattcggcgcaagctgttccaggatctgtcgaaaagcaccgtcaccattcgccataacagcagccagaccgcggtgccttaccgccagctggcggcgttcctgccgggcaccggcgtcggcggcgccggcctgcactggtcgggcgtgcatttccgcgtcgatccgatcgaactgcgcatgcgcagccattatgaagagcgttacggcaaaaacttcattccgaaggacatgaccatccaggacttcggcgtgacttacgacgagctggagccgttcttcgacaaggcggagaaagtgttcggcacctccggcaccgcctggaccatcaaggggcagaaagtagcgcagaagggcggcaaccgctttgcgccggatcgctccgacgacttcccgctgccggcgcagaaaaatacctactccgctcagctgttcgagaaagcggcgctggaggtgggttaccacccttacaacctgccgtccgccaacacctcggattcttacaccaacccgtacggcgcgcagatgggcccgtgcaacttctgcggtttctgcagcggctacgcctgctacatgtattccaaggcctcgccgaacgtcaacatcttgccggcgctgcgcatggagaaacgcttcgagctgcgcaccaacgccaacgtgctgaaggtcaacctgaccgacgacaaatcccgcgccaccggcgtgaactacgtcgatgcgcagggccgcgagattgaacagccggccgatctggtgatcctgggcgcgttccagttccacaatgtgcacctgatgctgctgtccggcatcggcaagccttacgatccggtaaccggcgaaggggtggtcgggcgcaacttcgcctaccagaacatgaccaccatcaaggcgttcttcgataaagacgtgttcaccaacccgttcatcggcgccggcggcaacggcgtgggcgtggacgacttcaacgccgacaacttcgatcacgccaaagaaggcttcgtcggcggttcgccattctgggtcaaccaggcgggcaccaagccgatctccggcctgccgaccccgccgggtaccccggcctggggcagcaagtggaaagcggcggtggcggatgcctacacccatcacgtgtcgatggacgcccacggcgcgcaccagtcgtaccgcaataactatctggatctcgatcccaactacaagaacgtctttggccagccgctgctgcgcatgacgttcgactggcaggaaaacgacatcaagatggcgcagttcatgtacgacaagatggcgccgatcgccaaggcgatgaacccgaaactgatcgccggcagcccgaaaaacgccaacagccacttcgacaccaccagctaccagactacccacatgaacggcggtgcggtgatgggggaagatccgaagaccagcgcggtcaaccgctatctgcagagctgggacgtgcacaacgtgttctcgatcggcgcatcggccttcccgcaagggctgggctacaacccgaccggcaccgtggcggcgctggcttactggtctgcccgcgccattcgcgagcagtatctgaaaaacccaggcccattggtgcaggcataaggacggcgaacgatgaaagcatttgtaccggcactggttctcagtgcagtgagtttttccgtttgggcgcaggacgccaccgtcagcagcgagctgatcaagcgcggcgagtacctggcgcgcgccggtgactgcgtggcctgccataccgatggcaagaacggcaaaaccttcgccggcggcctggcgatggagacgccgatcggcaccatctactcgaccaacatcacgccggacaagaaaaccggcatcggcgattacagcttcgaggatttcgacaacgcggtgcgtaagggcgtagccaaaaacggcagcaccctgtacccggcgatgccgtacccgtcgttcgcgctggtgaaagaggacgacatgcgcgccatgtatgcctatttcatgcacggcgtgcagccggtggaacaggccaacaaggactctgacatcccgtggccgctgtcgatgcgttggccgctgagcatctggcgcggcatgtttgcgccgtcgccggcggacttcgttgccgacgccaaggccgatccggtgattgaacgcggacgttacctggtggaaggcctgggccactgcggcgcttgccataccccgcgcagcatcaccatgcaggaaaaagcgttgagcaacagcgaaagcgacgactacctgtccggcagcaacgcgccgatcgacgggtgggtggcttccagcctgcgcggcgaccgcaaggatggcctgggcagctggagcgaagccgagctgaccgagttcctgaaaaccggccgtaacgacaaggcgatcgtgttcggcggcatgagcgacgtggtggagcacagcctgcaatacctgagcgacgacgatctgaccgccatcgcgcgctacctgaaatcgctgccgccgaaagacggcaagcagcaggcggcgccggtcgaagacagcgtggccaaggatctgtggcgcggcgacgacagcaagcccggcgcggcgctgtatgtcgataactgcgcggcctgccaccgcaccgacggcgtgggctacaagcgcgccttcccgtcgctgaagggcaatccggtggtgcagaccgaggacgcgacttcgctgatccacatcgtgctgaccggcaacactacgccggcggtgcagggggcggtatccaacatcaccatgccgccgtttggctggcgtctgaacgatcagcaggtggcggacgtggtgaacttcatccgctcgagctggggcaacagcgccaaaccggtgagcgcttccgacgtagccgacgtgcgtaaagaccgctcgatgatccgcgacgagaaggagatgggcagcgccgaggtgccggaccatccggacgcgaagaaataaaccgcttaagggctccgcaaggggcccttagtttttactgagtgcgccgtttttttcagcacattgtgttcgcaaatcgttcattcggccgataaaacatagacccgcagcggatttttcattatcctttgccgtcctttcatcaggcgtaagtatgaaatatcgctttaattcactgattattattaaaaaactcgcggagaaggatatcccgttaggcgcaatcgttgtcgccgcagattaaggtagactgtctcatgagtacgatttctcccgattcaggcacgctgacggccgctcagcctgccaaatggaacaaaaccgacaccgtctggatgttcggtctctatgcgactgcggtgggcgccggtacgttgttcttgccgatcaacgccggcctgaacggcccgctggtgttgctgttgatggcgctgttcgctttcccgctgacttatttgccgcaccgcgcgctcagccgcttcgtgctttccggctccagccgcgacggcaacattcacgatgtggtggtggaacacttcggcgtgctggccggcaaaatcatcatgatgctgtatctgatggcgttcttcccgatcgtgctggtgtacagcatttcgatcaccaacgcgctggacagcttcctgatccatcagttccacgtggccccgctgccgcgcatctggctgagcctggcggtggtggtggtgctcaatctggtgctgctgcgcggcaaagacagcatcgtggcggcgatgggcatgctggtgttcccactgctggtgttcctgatgggcatttcgctctatctgatgccgagctggaataccgccaacttcgtgcacggcctggccgccacccgcttcgacacgccggggttgtggcattcgctgtggctggcggtgccggtgatggtgttctccttcagccatgcgccgatcatctcttccttcgcctcgacccagaagagcctgtacggcgacaaggcggaacgccgctgcgcgcgcatcatgcgctatagctatgtgctgatctgcgttaccgtgctgttcttcgtgttcagctgcgtgctgagcctgtctcatgaagacatgctgcaggcgaaagagcagaacatcacggtgctgactacgctggccaacaagttctccaacccgctgatcgcctaccttggcccggtgatggcgatgctggcgatggccaaatcctatctcggcacttcgctgggggtgacggaaggggcgaccagcctgatcgacggcgtcacgcgcgcggtcggcaagccgctcagttcgcgcatgacgcaccgcatctcggcggcgtcgctgttcctgctcacctgggcggcgacggtgtggaaccccagcgcgctgcacatcatcgaaaccatcagcggcccgctgattgccgccatcctgttcattctgccgatgtacgccgtgcgtgcggtgccggccatgcgccagtaccgcgcggcgagcaacgtattcgtgctggtgatgggcctgattgcgctgtcggcgctgatctacggcctgatgtgatcccctgggcgcgccgcttccggcgcgcctcttatccttcctttacacatccctttgcaattaatcgccgacatgccgggcgttatctttgataatgcaagccattctcattagtattttctgaatgtattcatgactaaggagtttttcgtgcaccgtcgaatcattttgccggcgctggtttgcgccgccttgctcgcctctccggcgatggccaccacttatccgctgacgctgaccgacacgtccggccagacgatcaccctccagcaagagccgaaacgcatcgtggtgcaggacgggcgcgacattctcacgctggcgctgctcgatcgcgccaatccgttcggccggctggtggcctggaataacctgctgaagaaaagcgatgcggcgacctgggatatcttgcagagcaaatggccgggggcgaaaaacatcatcgatatgggattcagcgataagggtgaagtgaacctggagagcgtgatcgccaagcggcccgatctgatgatcgcccagctgcgttccaagccttcgctgagccaaaccggcgtgctggataagctgaaggcgctgaacgtgccggtgctgttcatcgataccatgctcaagccggtggaaaacacgccgaaaagcgtgacgctgctgggggaaaccctcaaccgcgaaagcgaagccaagcaatataccgattattatcagcagcattatcaggccattctggccaaaacgcaggcggtggcacccaaaccgcgggtgtttttcgaagccaaggctggcctgaatgggctggagtcctgctgcttcacccatgcgcacgtcggctggggggcgctggtcgaggcggtcggcgcgcgcaacatcggctctgcgctgttgccgggcgcgaccggcgacgtggcgctggaaaaagtgatcgccatgaaaccggacgcctacatcgtttccggctcacagtgggccagcaagaccaacgccgcggtgccgttcggctatggcgtgacgcagcaacaggtggatgaggctttcaaccgcatgaaacagcgcccgggcttcgcgcaggtgtcggcggtgaaagaggggcggttctacggcatctaccataatttctacaaccatccgtacaacatcgtggggctggagtatctggcgaagtttatctacccggcgcagttcccggatctggatccggccaagacctacagcgagatcctcagccgctttaccgaagtgccggaaggcaagggcattttgggcgcgcaggcgccgatggggaaataacggcaacgggcgcgacgatcgcgcccgttttgtgtgatcaggcggccggcgtataggtggagatgatctccagcacgccgttgataatgaactgtacccccatgcacaccagcaggaagcccatcaggcgcgagatcgcctcgatgccgcttttccctaccaggcgcatgatggcgccggagctgagcaggcagccccacaggatcaccgcgaccgtcaggaagatggcgaccggcgccacggccagcacccagggttcaaaacccagcgtgttcgctttgacgctcgacgccgagctgatgatcatcgcgatggtgcccggcccggcggtgctcggcatggccaacggcacgaaggcgatgttggccgatgtcttgtggcgcagctcgtgcgacttgctctccacctccggcgcctcatcggcgctttgttgcgggaacagcatgcggaaaccgatgaaggcgacgatcaggccgccggcgatgcgcaggccggggatcgaaataccgaaagtgttcatcaccacctgcccggcgtaaaacgccaccgtcatgatgcagaacacataaaccgaggccatcagcgactgctgattgcgctcttcgcgcgtcatattaccggacaaaccgagcagcaacgccaccgtggtcagcgggttggccagcggcaacagcagcaccaaacccagtccgatggcctggaataactgcaaaatacccgtcataaagtagactccctgtgcaacgttcaggccgccaagcggcggcctacgagctaaacagcctagcctgccgcgtgcctggcggcaatggggatagctcgtaacgttaattaaccgtcggccggcgtttcatcattgccgttgcactcgccggcgagctcaggttcatcctcacatcccaacggggcgtcgttgaccgcaatcgcccgcggcgccgaacgcgcaccaaaatgcatcagcccctataacgtcgttaataccgcgcacccatgatgagcgcaggctgaaaaacgagcggcgctcagaaaaaatgcacaatttttgtgttttatggcctttttcgccgcaattggccggtaaaggccgacgttcagcaccaattgctacaccccgcaggctcagctgcctaccataggcgcgctttaaaacgataatgagattgattatgcaagacgagttgaaacttttactggggaaaatcagcgcattcgcgctttccgccgccttcatggcggcattggtcggcctggtgtttatcgatgtgcactggttgcataacttcgtgcatgaaacctcgctgaccgaagcggcgcaggaactgttgctgctcgccatcgccggcggttttttcgccgcggcctggcggcaggcggaacgccgctccgcctggatgctggtcggcggcttctttctctgcatgctgatccgcgagatggacttcgccttcgatgcgttgtggcacggcgcctgggtgtggttcgcgctggcggtcgccttggtctgtctgtgccatgccgccaggcacattgcggcgacggtgcgcggcctggcctatttcgcgacgcatcccggctacggcatgatgtgcgcgggcctgctgtgcattctggtgttttcacgcctgttcggcatgagcgcgctgtggcaaacgctgatgctggacggctacaaccgggtggtgaaaaacatggtggaagagggttgcgaactgctgggctacggcctgtgcctgctggccgcattaagttatttgaaagcccccctgacgtcgcaaaaaagagaagcgctagctgaaaaatcatgatgttataacggatatattagcctgtttttcaggtaagttcgcgacctccttcagccccgcattcgcggggtttttttacgttgtttgagaatgggcacaatagcgaccatttgggctcgggttcgcggattggtatagttacggtactgtatataaatacagttttattggcttgttgtgttggaaagtggcagtaataaacaataggtcattgatatttaaattcatttaaacttaaggaacatttatgagtgatgaatacgccgccgccgtgactgaagtcgaaagctttgaacgcctgcgccaattggcgccgacggccgaaggtgagaaaatcaagctgcgcagttggcatacagataaagaccttggcggcggcgagtttgttggacacttgggcaacgcgagcgatgatggcggcattattgccgcaggcaacggttactattggaagcgcattctggaaaatgaagtgcacgccaatatgttcggcgccttgccggcttccgtggatagtcaatacgactccgcgccggcgttccgcgccgcggttgcggcggtcaaaattcataaccgcagcaagctttactacgaaggcaactataacctcaaatccgtcggcccaacggtatatgagctgccgtatgacgacggtaccgtttcccctaattttaaagccaagggggaagttgacatcgatccggaagagattcatacgatgccgatcgttttggatattccgagctatgtggtgttggaagggctgggcaatatcagttcagcgttgatcttcacctggcggcgcggcgaaggtccgatcgacacgcagcaggcgatcggcatctgttggcgcgttgcgggttatcccgccaaagaccgcatgacggacatggttcgcggcgttgggttggttaacacatccatttcttctgcctttatcggttgcctggcggacggcgttttgttctaccggatcaatttccgcgacctgattttcaataactgtggcttgccgttcatcgcgcagggctcggatgccgtgacgttcgccggttccacctctctggagtcatgcatggcgggcatcatcattggcgggatgtggctgacgcgcaacgatacctgggtgggcggcaagtgggtaccaccttatgccgacgacaccgacgtttatgccatgggctggtgcgactacaccacctttgaattcctgagcggttcttatccttcccctggctatacgccgcgccataaggtgcttgatgagtttttcaatacctacttctacaaatcagccaactccgagccagtggcgaagggcgggcgtttaaccgccacggatttccagggtatcgtgtcggactataatggaaaggatccgtatcgcggcgtggcggggcgtttcttcatcaacttctctcgttacaaacgcggcaactgcaacgtgcagattaaggacatgaaggtttatggcccaccgcgcgtaccggtttatacgccacgcattcaggggcaagattattacggcactatcgagaatgcctacatcgaacgcgttggttttatcgaacataccaagccctggagcgatgcgaacgatttctacaagagcctggatacctttaacccggattataaaacatgcccgaacctggtcgctgaaggggtgattggcgcgcgcaaagttactttgcagggtacgccatatcggccgacatcccaggggatggcccacagcaatacccgccagcattttaacatttggaccgatgatctggagaagtggaaagagaacacgagcagctctgccgtgattaacgattgcctggtttatgacaacaatggcaaagggtggtgggtctggcgtaattttatggatcgagtgtttactcgtccgctgattttcaacgaggatgatgtcggcaaactggagaaggcgtttaagtggcgcgtagaccagttggtgctcagtttgaaatccgccggcgcgacggtggcgtcgatcaatgcgaacgcacaatggtttagcgggttgggctacattagcgtggagatccctattcccgacaacgccgccagtgataacggcatgctgtccgttacctggctgcctaagattgatccggactcgccgacgggtatcaagggcacgacgtccatggtatcgggttacagcatcgtcacaaccgagaatatcgacgtcaagaatggcgccggcacggttgttggcagctttagccagaaaaaagaagtcaaaggcgtcaccatgaacaatcagcagctctacctgcattcggatcgcgagtgcagcgatgcggcgcgattgaaaatgagtgacttcaaacccggcagcagcattacggttcagatctgcttcccggccaagtttaactggtattgatttttgcaagcgctttagttttagagggaggggaggctcctccctttcttatcaggctttacgcccattcagcgaatttttgctcaatcctttggtggaagatggcctttctaaagtgataaactcattatcccgttatgacgtaacaacatagtacatttgaaactgtgtctctatgcgtgtacatatctggcagggtaaagctggatagcgtcgataacatcttgtagttaaacaacattgtatttcttcatgtgatctgtcgtgtgggtcaccactgtagataaggaattattaatgcctgttattactcttcctgacggtagtcagcgtcatttcgaccaccccgtttccccgatggatgtcgcgcgcgatatcggccctggcctggcgaaagcctgtatcgccggtcgcgtcaatggcgaactggttgatgccagcgatctgatcgaatcggatgcgcagctggccatcatcaccatcaaagacgaagacggtctggaaatcatgcgccactcctgcgcgcacctgctgggtcatgcgatcaagcagctgtggccggataccaaaatggcgatcggtcctgttatcgacaacggtttctattatgacgtggatatcgaccgcaccctgacgcaggaagacctggatctgctggaaaagcggatgcacgagttggccgataaggattacgacgtcatcaagaagaaggtcagctggcaagaagcccgcgacaccttcgctgagcgcggcgaaatctataaagtggcgatcctggatgagaacatcagccatgacgatcgtcctggcctgtatcaccacgaagaatacatcgacatgtgccgcggcccgcacgtgccgaacatgcgtttctgccaccatttcaagctgcagaaaacctccggcgcttactggcgcggtgacagcaaaaacaaaatgctgcagcgaatctacggcaccgcctgggcagacaagaagcagctgaacgcctacctgcaacgcctggaagaggcggccaagcgcgatcaccgcaagatcggcaaacagctcgatctgtatcacatgcaggaagaagcgccgggcatggtgttctggcacaacgacggttggactatcttccgcgagctggaagccttcgtgcgcatgaagctcaaagagtaccagtaccaggaagtgaaaggtccgtttatgatggaccgcgtgctgtgggaaaaaaccggccactgggaaaactacaaagacgccatgttcaccaccgcgtcggaaaaccgcgaatactgcatcaagccgatgaactgcccgggtcacgtgcagatcttcaaccagggcctgaagtcgtaccgcgatttgccgctgcgcatgggcgaatttggcagctgccaccgcaacgagccttcgggttccctgcacggcctgatgcgcgtgcgcggcttcacgcaggatgacgcccacatcttctgtaccgaagagcaggtgcgcgccgaagtgaacgaatgcattcgcatggtctatgacgtgtacggcaccttcggcttcgacaagatcgccgtcaagctgtccactcgtccggaaaaacgcatcggtaccgacgacatgtggacccgtgcggaagaagacctggccgccgcgctgaccgagaacggcattccgttcgagtaccagccgggcgagggcgccttctacggaccgaaaattgaatttaccctgcatgattgtttggatcgcgcatggcaatgtggtaccgtgcagctcgatttcttcttgccgggccgtttgggcgcctcgtacgttggcgaaaacaacgatcgcgtcgtgccggtaatgattcaccgcgccattttgggctccatggaacgcttcatcggtatccttaccgaagaatacgccgggttctacccgacctggatcgctccggtgcaggtggtggtgatgaatatcaccgacagccagtctgattacgtccagcaattgaccaaaaaactgcaggatgcaggtattcgcgtgaaagcggacttgagaaatgagaagattggctttaaaattcgcgaacatactttacgtcgagtcccttacatgttggtgtgcggcgacaaagaggtcgaagccggcaaagttgccgttcgtacccgccgtggcaaagacctgggaagcctggacgtaaacgaagtcgtagacaagctgctgaaagagattcgcagccgtagtcttcatcaactggaggaataaagtattaaaggcggaaaacgagttcaaccggcgcgtcctaatcgcattaacagagaaattcgcgcgcaagaagttcgcctaaccggcgtcgatggcgagcagattggtattgtcagtctgaatgaagctcttgaaaaagctgaggaagcgggcgttgatttagtagaaatcagcccaaatgccgaaccgccagtttgccgaatcatggattacggcaaattcctctacgagaagagcaagtcgacgaaagaacagaagaagaagcaaaaagttattcaggtcaaggaaatcaaattccgtcctggcaccgatgatggcgactatcaggtcaaactacgcaacctgattcgctttctggaagatggcgataaagccaaaatcaccctgcgtttccgtgggcgtgagatggcgcaccagcagatcggtatggaagtgcttaaccgcgtccgtaaagacctgtgtgaagatatggatctggcagtggtcgaatccttccctacgaagatcgaaggccgccagatgattatggtgctcgctcctaagaagaaacagtaaggcttacaagtaatggaacccgcgcggcgcttgcgctgtgtgggttttattcgcccaactgattcgttgtttaacaatgcgaagtggatttaattaaaatgccaaagattaaaactgtacgtggtgcagccaagcgcttcaaaaaaaccggcagcggtggttttaagcgtaaacatgccaacctgcgtcatattctgaccaaaaaagcaaccaagcgtaaacgtcacctgcgtccgaaaggcatggtgtctaaaaacgatctggtcctggttaccgcgtgcctgccgtacgcataagccattttttttgaatttagaataagactttaggagagagcatatggctcgcgtaaaacgtggtgtaattgcacgcgcacgtcacaagaaaatcatgaagcaggcgaaaggttactacggtgcccgttcgcgcgtatatcgtgttgccttccaggcagtaatcaaagcaggtcagtatgcttaccgtgaccgtcgtcaacgtaagcgtcagttccgtcagctgtggattgcacgtatcaacgcagctgctcgtcagaacggtctgtcttacagcaagttcatcaacggcctgaaaaaagcctcgattgaaattgaccgtaagatcctggctgacatcgcagtcttcgacaaagtggccttcggcgcactggttgagaaagcgaaagcagctctggcgtaagtcagtagaagagggagcttgctccctcttttaatctttgttttcagcgacaaatattgactttcattggccgccgctatatcactggtggacaatcatcgacaaggtaccgcaatcatgcacgcagctctttttcgtttctttttttactttagcgcctgatttcaggaggctttgcgcgtaagaaaagaaacgaaaagtagcgcctaagcctccctcgtggaggcttttttgtttttggccatcgtctcgccttgccaggcgttgcggtgagggcggcagacgcaacgcgggccatgcgccgcgcaggcgagccggccggccggcaacgtattgaaaagtctttgaataatggtcaaaggcgtgttcgaatatagataacaattacttagggccattccggccagaggaagaggaaagcaatgccacatctcgcagagctggttgccaatgccaaggcagccgtagaagatgcccaggatgttgccgcgttagatttggtgcgcgtcgaatattttggcaagaaaggtcatttcaccttgcagatgcagtctctgcgtgacgtaccggcggaagaccgtccggcggccggcgcggtgatcaaccaggccaagcaagaagtacaggacgcgctgaacgcgcgtaagaacgcgctggaaagcgccgcgctgaacgcgcgcctggcggctgaaaccatcgacgtttccctgccgggccgtcgcatggagaacggcggcctgcatccggtgacccgcaccatcgaccgtatcgaaaccttcttcggcgagttgggcttttccgttgccaccggcccggagattgaagacgattaccataacttcgacgcgctgaacattccagggcatcacccggcgcgcgccgaccacgataccttctggttcgacgccacacgcctgctgcgcacccagacttccggcgtgcagatccgcaccatgaagaaccaacagccgccgatccgtatcattgcgccgggccgcgtttaccgtaacgactacgatcagactcacaccccgatgttccaccagatggaagggctgatcgtcgataaagacatcagcttcaccaacctgaagggcacgctgcacgatttcctgaacaacttctttgaagaagacctgcaggttcgtttccgtccgtcctacttcccattcaccgagccgtccgctgaagtggacgtgatgggcaagaacggcaagtggctggaagtgctgggctgcggcatggtgcatccgaacgtgctgcgcaacgtcggcatcgatccggaagtttactccggcttcgccttcggcatgggcatggagcgcctgacgatgctgcgttacggcgtcaccgacctgcgcgcattcttcgaaaacgatctgcgtttcctcaaacagtttaagtaaggcgggaatatcacatgaaattcagtgaactctggttgcgcgagtgggtaaacccggccatcagcagcgaagcattatccgatcaaatcaccatggccggcctggaagtggacggcgtggatccggttgccggcgcgtttaacggcgttgtggtgggtgaagtggtcgagtgcggtcagcacccgaacgccgacaaactgcgcgtcaccaaggtcaacgttggcggcgaccgcttgctcgacatcgtttgcggcgcgccgaactgccgtaccggcctgaaagtggcggtcgccaccgtgggcgcggtgctgccgggcgatttcaaaatcaaagccgccaagctgcgcggcgagccttcggaaggcatgctgtgctcgttctccgagctgggcatttccgacgatcatgacggcatcatcgagttgccgctggatgcgccgatcggcaccgacatccgtgactacctgaaactgaacgacaacaccatcgagatcagcgttaccccgaaccgcgccgactgcctgggtatcatcggcgtcgcgcgcgacgtgggcgtactgaaccaggtggcgctgaccgagccagacatgagcccggtggccgctgcgattgacgccacgctgccgatccgtgttgacgcgccgcaggcgtgcccgcgctatctgggccgcgtggtgaaaggcatcgacgtcaaggcgccaagcccgctgtggatgcgtgaaaaactgcgtcgctgcggtatccgctccatcgatgcggtggttgacgtcaccaactatgtgctgctggagcttggccagccgatgcacgctttcgatctgagccgcatcgacggcggcatcgtggtgcgcatggcggaagaaggcgaaacgctgaggctgctggacggcagtgaagccaaactgaacgccgacaccttagtgatcgccgatcatcaaaaagcgttggcgatgggcggcatcttcggtggcgagcattccggcgtcaacggggaaactcaggacgtgctgctggaatgcgccttcttcagcccgctgtcgatcaccggccgcgcgcgtcgtcacggcctgcacaccgacgcttctcaccgctatgagcgcggtgtcgatccggcgctgcagtacaaagcgatggaacgcgccacgcgcctgctgctcgatatttgcggcggtcaggcaggcccgattatcgacgtgacccacgagaacgaactgccgaagcgcgccaccatcacgctgcgccgcgagaaactggatcgcctgatcggccacgtggtgccaagcgagcaggtcagtgacattctgcgccgcctgggttgccaggtgaccgagcagggcgacagctggcaagcggtcgcgccaagctggcgtttcgatatggagatcgaagaggatctggtggaagaagtggcgcgcgtttacggctacgacaacatcccggatgtgccggtgcgcgccgatctggtgatgacccagcatcgcgaagccgatctgacgctgaagcgcgtgaagaccatgctggtcgatcacggttatcaggaagcgatcacctacagcttcgtcgatccgaaggtgcaggcgctgctgcacccgaatgaagaagcgctgatcctgccaagcccgatttcggtagaaatgtcggcgatgcgcctgtcgctgtggaccggcctgctgtctgcggtggtgtataaccagaaccgccagcagacgcgtctgcgcctgttcgaaagcggcctgcgctttgtgcctgatagtgcggcagatctgggtatccgtcaggatgtcatgctggcgggcgtgatcgccggccatacgcacgatgaacattgggatctggcgcgcaagcccgtcgacttctatgatttaaaaggggatctggagtccgtcctcgagctgaccggtaaattatccgaaattcagttccgggcggaagccaatccggccctgcatccagggcaaagtgcggcgatttatttgcacggcgaacgcgtaggtttcatcggtgtggttcacccggaacttgaacgtaaactggatcttaacggccgcaccgtggtgtttgaactggagtggaacaagcttgcgagccgcgccgtgcctcaggcgcgggagatttcgcgcttcccggcaaaccgccgtgatatcgccattgtggtggctgaaaacgtccccgcagaagatattttggccgagtgtaagaaagttggcgcaaatcaggtagttggcgtaaacttgtttgacgtgtaccgtggcaagggcgtggcagaaggtgacaagagcctggctatcagtctggtattgcaggataccgctcgtacactggaagaagaggagatagccgctaccgttgcaaaatgcgtagaggctctaaaacagcgattccaagcatccttgagggattgaacctatggcgcttactaaagctgaaatgtcagaacacctgtttgagaagcttgggcttagcaaacgggacgccaaagacctggtggaactgttctttgaagaggtccgtcgggctcttgagaatggcgaacaggtaaaactgtcgggttttggcaactttgatctgcgtgacaagaaccaacgtccggggcgtaacccgaagaccggcgaagacattccgattacggcgcgccgtgtggtgaccttccgtccggggcagaagctgaaaagccgggtagaaaacgccagcccgaaagggtgagtgacgtgacatcaaaaaaggccgcttgcgcggcctttttcttttctgagacaaaattcagtttattcctaataggcaatgcatgaattaaaattattcattaaatcgcctcggcgaaaatttatttaatctcaattacggagtattcttatatcttattttgtgtggtgagcagccatatttgttgtttcaataacggccgtaataatggccagggccgtcgccgcggtggccaccgcccccgtgcgggccccagcagcaggcgctcagggttgaggccagggctacaacggttagcagcataccaatacgtttaatcatcttataatcctccggtggaaatccatttaactataattgccgcgccgcttgagagacgtcagttattcgttaaatcttgtcagtggttatgataattaaaggtggcggcaaacagtgtagggattgtgtaaggccgtcgaaaacaatctgaaaataggcatcggtgagatagtcgttaaataagcacgctgatataaccactgcagcaagaaaatagagtgagaaggtgaaatgaaaaagatcctgttgctggtgtgtttcccgctgttgctgccgctggcggcgaaggccgatgtctccgtcgatatcaacgtgccgggcgtttctctgcatctgggggatcaggaccgtcgcggctactactgggatggctacgactggcgtccaccgcagtggtggcatgcgcaccagggccgcggcctgggtgagcgcaatgcgcgcggtatgtactgggacggcggacgctggcaaccttcgccgccgcgtggctatgagcatcgtgggccggaacgcagcggcaatccattccacggcgatcgcgatagtggcgaccacgaccgccgtcatgacgatcgcggtgaccatgaccgccgcgatggtggccgcggccaaccttatccaccgggcaacgccggcccgcatcgttaatccctgagtttatcggcggctggttttgccatcattgttgcgatgacgggcaaggccagccgctgctttcctgagccactatccacgcaagacttccccttgcggcgttaaccccctaatattcgactcaaacgtcaattatccggccacgacagcggccggcagggaaccgccgcgccatgccaaccagccgtaccttcaccttactgttgcaacatcaacgctaccgcgataaacgccagctcagtctgttggcgctgggcgtggcggtggcgttgctggtcagcctttgcgccggcgaccaatggatatggccgtcagcgtggttcagcgatcgagcgcaactgtttgtttggcaactgcgtttgccgcgcgcgctggcggtgatgctggtcggcgccgccctggcggtggcgggcgcggtgatgcaggcgctgtttgaaaatcctctggcggagcccggtctgctgggtgtcgctaacggcgccggcgtagcgctggtgctgacggtgttgttggggcacggtttgttgccggtggcgctgatgagcgccgccgcgatagccggtgcgctggcgatgaccttcttgctgctgggcttcgctcgccggcgacgtctgaccaatgcacggctgttgctggtcggcgtggcgctgggcatcgtgtgcagcgcgctgatgacctgggcggtctatttcagcaccagcctcgatctgcggcagctgatgtactggatgatgggcggtttcggcggcgtcgactggcgccaaaagtggctggtgctggcgctgctgccggtgttgctgtggctgtgtggccagggccgagcgctcaacctgatggcgctgggcgaggtgcaggcgcgccagctcgggctgtcgctgcatgtgtggcgtaacctgctggtgctggcgatcggctggctggttggcgtcagcgtggcgctcgccggggtgatcggcttcgttgggctggtgatcccgcatattttgcggctcaccggcctgacagaccagcgctatctgctgccggcctgcgcgctggcgggggccggggtgttgctggtggccgatgtgatcgcccgcgttgcgctgctggcggccgagctgccgatcggcgtggtgacagccacgctgggggcgccgctatttatctggttactgacccggacaaaaggcgtaaggtagttttcttcattcacctgccattaaaaaaccaaaggatgacaaccgatgagcaagccaatcgacaacctgccgttacaaaccatcgaaaatcagacgaccacgctgggtgcctatcagggcaaggtgctgctggtggtcaacgtggcctcggagtgcggcctgaccaagcagtacgaagggctggaagcgctgtacgaaacctatcgcgagcgggggctggaagtgctggggttcccgtccaatgaattcctgggccaggagccgggcagcaacgaagagatcctggcgttttgccgcggcaccttcggcgtgcaattcccaatgtttgccaagattgaggtgaacggcgaacaccgtcatccgctgtaccaagcgttgattgccgcacagccggaggccgtcgcgccggaaggcagcgagttcctggcgcggatgaccagcaaagggcgtgcgccgaagcatcccggcgatattctgtggaactttgagaaattccttatcgcgcgcgacggcacggtgatccagcgcttctcgccggacaccacacctgaggatccggcgctggtggcggcggtgaaacaggcgctggcagggtaatacggatgctgcaactcgttgaggttggggtggcggggcgcctggcgcctttttcggcacagattgacggcgggttgcaggttcacctgatcggcccaaatggcgcagggaagagtaccctgctggcgcgggtggcgggtatgctgccggggcggggcgaagtctgcctggacggacgcgcgctctccgattatccggggagcgagctggcgcgccgacgcggttatctcagccagcaacagccgccggtgtcgctgatgccggtgtttcagtatttggcgttgcaccggcctgccggcgcggcgcaaaccgaggtggaacacaccatcctctatctgtgccagcggttgaagctggcggataaactgtcacgcatgctgacacagctttcaggtggagaatggcaacgggtgcggctggcggcggtattgctgcaggtgtggcccagcgttaacccgcacagccgattgttgttgctggatgaaccaaccaatagcctggatgtggcgcaaaaggtcgcgctggatcgcctgctgcgcgaattctgccaaagtgggcgcagcgcgctggtgtgcgcacacgatctgaatcataccctgcagcaggccgatcgggtttggttgttgcacgctgggcagttggtcgcgcagggcatcacccgtgaggtgatggcgcccgcactgttgtcgcagatctatgaagtggatttccacctgcaatgggtggggaaccagcgttggatcatgacccgcacggcttaattcgccctggggtataaatataaacgaaaactaaacgtagtgaatataaatagccgggtaatcatcggctattattgtgctgcctctcattttctcgtgagttttcttgaaaaacgccaatgacgtgctacgcttgattcggcaaaaataaaatacgtaagtaattattaaaaaatataagaaattgatttacataataaaattaaattaatgatgacggcgccttcctatcagttctcccactgatgacaagtctcgtcttaaggtttagttaagcttgcggccttacattggcagttaatccacggaaacgattcttctctggcgtttaatattcgttaaacgaaagggatttacagtgtcatcaaaagcagttcgatacgtttggggttaactatggatcaatttttgcctttctctcgtccggccattggcgacgaagaaatcgccgcggtagagaaagtgttgcgttccggctggatcaccaccgggccgcaaaaccagcaactggaaaatgacttctgttccactttcggctgtaagcacgccatcgccgtcagttccgccaccgcgggcatgcacatcacgctgatggcgctgggcatcgggcccggcgacgaagtcatcaccccttcgcaaacctgggtttccaccctcaacatgatcgaactgctgggcgctacgccggtaatgatcgacgttgaccgtgagaccttgatggtcagcgccgccgatgtcgaggctgccatcaccccgaaaaccaaagcgattgttccagtgcattatgccggcgcccccctgcagatggacgctttgcgcgccgtggccgaacgccatcatctgccgttaatcgaagacgccgcccatgcggtcggcacgcgttacaacggcgaatgggtcggcgcgcgcggcacggcgattttctcgttccacgcgattaagaacgtgacctgcgccgaaggcggcctgatcgccaccgacgacgatgcgctggcggatcgcctgcgttgcctgaagttccacggcctggccgtcgatgccttcgatcgccagcagctgggccgcaaaccgcaggccgaagtggtggagccggggtacaaatacaacctgtccgacattcacgcggcgatcgccgtggtgcaactgtcgcgcttcgccgagctgaacgcgcgccgtaaggcgctggcgcagcgctacctgagcgcgctggaaggctcgccgttccagccgttgggcgtgccggattatccgcatgaccacgcctggcacctgtttatggtgcgcgtcgatccagcgcgttgcggtatcgatcgcgaccagctgatggagcgcctgaaagaggttggcatcggcaccgggctgcatttccgcgccgcgcacacccagaaattctaccgtgagcgctatccgcagctgtcgttgccgaataccgaatggaactcggcgcggctgtgcaccttaccgctattccctgatatgaccgacgccgacgtggatcgcgtggtcaatgccttgtcttctgttgtggagtctttacgtgtctcgcgttgaaccgattaaaaaagtgtcggtagtcattccggtatacaacgagcaggaaagcctgccggcgttgctggagcgtactactgccgcctgtaagcagttatctcaaccttatgaaatcatcctcgtcgacgatggcagcagcgacaactccgctgacatgctgaccgcggcggcggaaaagccggacagccacgtgatcgccgttttgctgaaccgcaactacggccagcactcggcgatcatggccggtttcaaccaggtgaccggcgatctggtgattacgctggacgccgatctgcagaacccgccggaggagatccctcgtttggtcagcgtggcggaagagggctatgacgtggtgggcaccgtgcgcgccaaccgtcaggactcctggttccgcaaaagtgcctcgcgcgtgatcaacatgatgattcaacgcgccaccggcaagtcgatgggggactacggctgcatgctgcgcgcctaccgtcgtcatatcgttgaggcgatgctgcactgtcatgagcgcagcacctttatcccgattctggcgaacaccttcgcccgccgtaccaccgagatcgacgtgcgccacgctgagcgcgagtttggcgactccaagtacagcctgatgaagctgatcaacctgatgtatgacctgatcacctgcctcaccactacgccgctgcgtttgctcagcgtggtcggcagcatcgtggcgctgtccgggtttgtgctggcgctggtgctgattgcactgcgtctgctgctcggccctgaatgggccgccggcggcgtgttcacccttttcgccgtcctgttcacctttatcggcgcccagtttgtcggcatggggctgttgggtgaatacatcggccgtatctataccgacgtgcgtgcgcgtcctcgctattttgttcagaaagtggtcggtgcacagcatgaccacaatactcaggaagaagaatgatgaaagctattgtatttgcttaccatgatattggctgcgcaggtctgaaagcgctgactgaggcgggttatgacgtgcaggccgtgttcacgcacaccgacgaccctggtgagaacaacttcttctcctctgtggcccgtttgggcgccgaattggatctgccggtctatgcgccggaagacgtaaatcacccgctgtgggttgatcgcattcgcgcactgcagccggacgtgatcttctcgttctactaccgccacatgctgagcgacgagatcttgtcgctggccccgttgggcggtttcaatctgcacggctcgttgctgccgcgttaccgcggccgcgcgccggtgaactgggcgctggtgaatggcgaaaccgaaaccggcgccacgctgcacaaaatggtgaaacgcccggacgccggtgacatcgtcggtcagcagaaagtgaccattgccgacagcgacaccgcgctgacgctgcacaaaaaagtgctggaagccgcgcagatcgtgttgaaagagcaactgccgaaactgaagaacggcaccgccactttcacccggcaggatgagtctcaggccagctacttcggtcgccgcaccccggcggacggtgagatcctgtggcacaaatccgccaaagagatcaacaacctggtgcgcgccgtcaccgagccgtacccgggtgccttcagccacctcggtcagcgcaagctgatcgtctggcgctctcgcgtgctggacacccaacacgataaacagccgggcaccgtgctgagcacctcgccgctggtcatcgcctgtggcgaaggtgcgctggaaatcgtcgccgggcagaatgacagcggtctgtacgtgcagggcagccgcctggcgcaggaaatgggcatcgtcaccgacgtgcgtctggccgccaagcccaacgccgtgatgaaacgccgcacccgcgtgctgatcctcggggttaacggcttcatcggcaaccacctgaccgagcgcctgctgcgcgatgaccgttacgacatctacggtctggatatcggttccgacgccatcagccgcttcctcgacaacccgcgtttccactttgtggaaggcgacatcagcatccactccgagtggatcgagtatcacatcaagaaatgcgacgtggtgctgccgctggtggcgatcgcgacgccgatcgaatacacccgtaacccgctgcgcgtgttcgagctggacttcgaagagaacctgaagatcgttcgcgactgcgtgaaatacaacaagcgcatcatcttcccgtccacatctgaagtgtacggcatgtgcgacgataaagagttcgacgaagaccattcgcgtcttatcgtcgggccaatcaacaaacaacgctggatctactcggtctccaaacagctgctggatcgggtgatctgggcttacggcgccaaagaaggcctgaagttcacgctgttccgtccgttcaactggatggggccgcgcctggataacctggacgctgcgcgcatcggctcttcccgcgccatcacccagctgatcctcaacctggtggaaggttcgccgatcaaactgatggacggcggcgcgcagaaacgttgcttcaccgacatcaacgacggcatcgaagcgctgttccgcatcattgagaaccgcgacggcctgtgcgacggccagatcgtcaacatcggcaacccgaccaacgaagcgagcattcgcgagctggcggaaatgctgctggaaagcttcaacaaccacccgttgcgcgatcgcttcccgccgtttgccggcttcaaggacgtagagagcagcagctactacggcaaaggttaccaggacgtcgagcaccgcacgccgagcatcaaaaacgctcaccgcctgctgggttggcagccgaccatcgagatgaagcaaaccgtcgccgatacgctggactacttcctgcgcacaaccgttcaggaagggaacggtgcatgaagaaagtcggtctgcgggttgatgtagataccttcagcggcacccgtgaaggggtgccgcagttgctggacctgttcgaaaagtacgacattcaggccagcttcttcttcagcgtgggaccggacaacatggggcgccatctttggcgccttttgcgtccgaaatttctgtggaaaatgctgcgttcgaacgccgcctcgctgtacggcctggatattctgctggccggcaccgcctggccggggcgcaatatttcgcgcgcgttggggccgctgatgaagcgcaccgccgaagccggccatgaagtcgggctgcacgcctgggatcaccagggctggcaggccaaggtcggcaagtggagcgaggcgcagctgaccgaacaggtgcagcgaggcgtcgatgccctgagcgccagcaccggccagccggtgaaatgctccgccgtggcggggtggcgtgccgacacgcgcgtgctggaggtcaagcagcgcttcggcttccattacaacagcgattgccgcggcacccatccgttccgtccggtgttgagcgacgggcgtcacggtacggtgcagatcccggtgacgttgccgaccttcgatgaagtgattggcagcgaagtcagcatggccgacttcaacgactacattctacgcgccatcgagaacgatcgcggcgtaccggtgtacaccattcacaccgaagtggaaggcatgtcgcaagcggcgatgttcgaacagttattgcaacgcgcacggcagcagggcatcgaattctgcccgctgagcgcgctgttaccgcaagatttggcgtcactgccgttgggccgcatcaagcgcgctcctttccccggccgcgaaggttggctgggctgtcaaaccgatgtgaaggacgttacatgaaggcgctaaaaggatcctgggccattctgctggccgttttttttgctctggtctatctgatcccgcttaacggtcgcctgctgtggcagccggatgaaacgcgttatgccgagatcagccgtgagatgctgcaacgcggcgattgggtggtgccgcacctgctggggctgcgctatttcgagaagccggtagcgggttactggttcaataacatcagccaatggctgttcggcgaaaacaactttgcggtgcgcttcggctcggtgttcagcaccggcatgaccgcgctgctggtgttcgcgctggcgatgctgatgtggcgcaatgcgcggcgcgccagcctggcggcgctgatgttcctgtcgatggtgctggtgttcagcatcggcacttacagcgtgttggatccgatgatttcgctgtggctggcggcggcgatggtcagctattacctgacgctgaaggcctcctcggtcaagggcaagctgggcgcttacgccttgctgggcctggcctgcggcatgggctttatgaccaagggcttcctggcgctggcggtgccggtgatcgcggttatcccgattgtcattcagcaacgccgcatcaaggatctgctgtgctatggcccggtggcgatcgtgaccgctacgctgctcagcctgccgtgggcgctggcgatcgcgcaacgcgaacccgatttctggaattatttcttctgggtcgagcatattcagcgtttcgccgaagataatgcccagcacaaggcgccgttctggtattacctgccggttctgctggcggcggtgctgccttggctggcgctgctgcccggcgcgctgctcaaaggttggcgcgagcgcgtacagcgtccggagctgttcttcctgctgagctgggcgctgatgccgctgatcttcttcagcatcgccaaaggcaagctgccgacctacattctgccgtgcatggcgccgctggcgctgctgatgaccgcctatgcggaagactatgccgccacgctgcgcgccaggctgttcaaggccaacgcctggttgaacggcctgttcgggctgattggcatcgtggcgctggtggtgttgagctccggtctgctgccgaaagcgcatctgtttactccccaggagtggccgaaagtggtgctcggcctgatcgccttcggcggctggctgctgttcgcactggtttctgcgcgcgataacggccgccaatggcgctgggcggcggcttgcccggtgctgctgtgcctggtgatcggttacgccattcctcaacaggtgaccgattccaaactgccgcaaaacttcgcccgcgccacgatggccgaactgagcgacagccgttatgtgttgagcgacagcgtcggattggcggccggcctggcctgggaactgaagcgcagcgacgtgctgatgtacagccagaaaggcgaggtggcctatggtctggagtatccggacgccaaggggcacctgatcagcgacgccgacttcccgcagtggctggcgcaggcgcgcaagcagggcaatgtgtcgctggtgttgcagctctcccgcggcgaagccctgccgcaggagctgccggccgcagacaaggtggatcgcatgaaccgcttggtgctgatgtggtataaacagcaaccatgatcggttttttgttggtgatagtggtcagcctgctcacctgtggtgggcagctgtgccagaaacaggcggcgcactgctgggaacgggcggacgaggcgcggctgaaacagacgctgcgctggttggcgctggcggtgttgctgttggggctgggcatggcggtgtggctcaatgtgctgcaacgcctgccgctcagcctggcttacccgatgctcagcctgaacttcgtaatggtgacgctggcggcgcgctggctgtttcatgagccgacaaccgttcgccactggtgcggcgtggcgtcgattatgctggggatcctgctgatgagcgtgcattcatgaggggctatgcctggggcgccgccagcgtgttgctggtgacgctggcgcagttgctgatgaagtggggcatggtgcaaatcccgctgatgtcgttcgccgacgtctcgttggcgctgatcggcgactactggctgccgctgctggcggtgggcggtggcatcttcggttatgcgctgtcgatgctgtgttggttctttgcgctgcgccatctgccgttaaaccgcgcttatcctctgctgagcatcagctatgcgttggtttacctggcggcggtgatcctgccgtggtttaacgaatccgctacgctgctgaaaacgttgggcacgctgtttattctgttcggcgtctggctgattaacagcaaatccgagaccaaatcgccgcaatagggccaaaaccggcgatcctgctattatctccctcatggcgcttgcctttttccccgtgcgggagataaattaacgcgaaatagcgctctccttacgtggtgccggctttgcctcgcaggcagtgtagtggtgtaccgaatggcataatgcggcaacgtgttcaatgaagggatattatgcggatgcgtgtgtggtttttattagccagtttaatcctcgccggttgcagcagccatgcgccgccacccagcggccgcctggcggattctatcgtggtggtagcccagctcaatgaacaattgcgccagtggtacggcacgccataccgttacggcggcctggatcgcggcggcgtggattgctccgggtttgtttaccgcacgttccgcgatcgcttcgacatgcaactgccgcgttcgaccgaagaacaaacctcactgggcaccaaggtttcacgcgatgagctgatgccgggcgatctggtgtttttcaaaaccggcggcggtgagaacggcctgcacgtcggcatttacgataccaacgaccaatttatccatgcgtcgaccagccgcggggtgatccgctcctcgctcgataacgtctactggaagcgggtgtactggcaggcgcggcgcatttagccttaacccgttgatttggtgtatcatggcggcatcacgtgttttgaacggtgcctgccatgaacagtttgcgtttactgatctccgactcctacgatccctggttcaacctggcggtggaagagtgcatcttccgcgaaatgaccacgcaaaaaatcctcttcctgtggcgcaatgccgaaacggtggtgattggccagtcgcagaacccctggaaagagtgcaatacccggcgtatggagcaggacggcattcggttggcgcggcgcagcagcggcggcggggcggtatttcacgatctgggcaatacctgcttcacctttatggccggcaaaccgggctacgacaagagcgtctcgaccgacatcattctgcaagcgctgcggcagttgggcgtcacagccggcgcgtcggggcgcaacgatctggtgatggaaaccgccgacgggccgcgcaaaatatccggctcggcctatcgagaaacgcaggatcgcggtttccaccatggcacgctgctgctgaatgccgatctggagcggctggcggactacctgaacccggatcccaaaaagctgcaggccaagggtatcacttcggtgcgttcgcgcgtcgccaacctggcggagtttttgccgggcatcagccatgagcaggtatgcgacgctatcgtgcaggccttcttcgcccactatggcgaaacggccgagccggagatcatttcgccggatgtattccccgatctgcccgattttgccgcgcagttcgccaaacagagcagttgggaatggaattttggcaaggcgccggcgttcagccacttgctcaacgagcgttttgtctggggcggcgtagacctgttcttcgatgtggagaagggggcgatcgttcgcgcgcaggtattctccgacagcctgaatcccgccccgctgcagcggttggcggagatgctggtaggctgtgcgtatcgaagcgagcccgttgccgcttgctgtgaccggctgatggcggactatcctcagcaggcggccgaattaaccgagctgcggcaatggctgagcgaaacgatccgctagcgcaggcctgatgatgaagggatgagcgtgctcatccctttttttatcgctgaaatcgacgttttgcatggtggtagcgcagattttctgaaaatcaaggtgggcatttttttacgttttcaatgccgcgaataacgggcggaattgatgcgttattaaatttaatcagtcgtcgttaacggcagggaaaattggcgttaagaaggaaagattattttactttatttaggatttttcttaaataaaacaaaggagataagtcaaatttagtcataaatccattcaacttaagtcaaataccttttcgcataacgcgtttggcggctaccttggcataagtccggctgcttttctttgcgccttttacgattgtcgtatagctttaatctatcaattaaatgatatttcatgggtatttacattgatatttccgattaatcccagagggattgatcgataaaatgtattgatatacgatgatacgctagccattcatcctgtggcattaaaatgaacatccaactcgaagctgactttattagtagctatgtttttcaacctgtttactcaatggagggcgggctgttggcggtggaaatgttgagccgtttcaacagtctcgacggtgatttagccatgccggccgaaattgggattaatttattggcgcctgaacaaaggattgagttatttaatgagcaactgaaacttgcggagcagcatgcggcttggtttaccgataacaacgtacagttgaccatcaatatcgaagaaaccatcgttgagcttattctttccgattcggcgttgtgccaaaggatcgggcaatatccttttattgcatttgaaatgagtgagagttttccgaatctttcggccggtaagaacaacccgagcgtgcggcgattaagcgaaatgtttacgctgtggctcgatgatttcggttccggtaaggccacgttgaccgcgttgtacgatggtttgtttgactacgtaaagatagacaaacgtttttactggcagctgtttacccatcaggggtatgacgtggtcatcgactcgttgttaaagaatatcaacctgttgtgtaaaggcgtgatcgtcggaggaatagagaaaaaagagtactttaataaactcagatacgccggtgttttaggcctgcaaggttttttatggcccagcgttggtgtggataatctgcaagctttgctgacgatgcccagcgagttcaataattaagaagtgatacaaaaaaactacacacaatgaggtaaataagcgccggggtgatgtttagcgtgattcagtcgccgttattcccccacgtttttgctgataaccgcgtttgtcagccgacgttcagcgcgtttcctcacgcgaaacctcccgcatccgttctggcgacaggcggatgcgttctccctgcattccttcggtgttaatcctcccgttcaggctctacactacgctgaaacggagggcctatgccgcagttcgataacgcttactaccaacaactacctggtttctacaccgctctgaatccgacgccgctcaaggatacgcgcctgctgtaccatagcgagccgctggcgcgcgagctggggctggatgaaagttggtttactcaggataaaaccccgatttgggcgggagaaacgctgctgccgggcatgcagccgctggcgcaggtgtacagtggccaccagttcggcgtgtgggccgggcaactgggcgatggccgcggcattttgctgggcgaacaggtcatggcggacggcagccaccgcgactggcacctgaagggcgccgggctgacgccgtattcacgcatgggtgatggtcgcgcggtgctgcgttcggttgtccgcgagtttctggcctctgaggcgttgcaccatctggggatccccaccacgcgtgcgttaactattgtcaccagtcaacaaccggtatatcgcgagcagccggaacgcggcgcgatgctgctgcgggtggcggaaagccatgtgcgcttcggccacttcgaacacttttactaccgcaaacagccggagcaggtgcggcagctggcggatttcgtcatcgcccgtcactggccgcagttgcaggatcaggccgatcgttacctgttgtggtttaccgacgtggtcgaacgtacggcgcgcctgatcgcccattggcaaaccgtcggattcgcccacggcgtgatgaacaccgacaacatgtcgattctcggcatcaccatcgattacggcccctacggcttcctcgatgactaccagcccggctatatctgtaaccactccgaccatcaggggcgctacgctttcgacaatcaaccggcggtggcgctgtggaacctgcatcgcctggcgcagaccctgtcggggctgatgaccaccgaacagctgcagcaggcgctggcggcgtatgagccggcgctgatgcgcgcctacggtgaacagatgcgcgccaaactcggcttcttcacgccgacggcgcaggataatgacgtgctcaccggtctgttgagcctgatggcgcaggaagggcgggactatacccgcacgttccgcctgttgagcgacactgaacagcaacaggcgcagtcgccgctgcgcgacgagtttatcgaccgcgcggcgttcgatgcctggtatcagcagtatcgcaggcgtctgcagcaggaacaggtgagtgatgcggaacggcaacgggcgatgaaggcggtgaacccgcgcctgatcctgcgcaactatctggcgcagcaggcgattgaggacgcagagaaagacgacgtgggccgtttgcagcggttgcatcaggccctgctgcggccgttcgacgatgcgccggagtatgacgatctcgccgcgctgccgccggactggggcaaacatttggagatttcctgctccagctgagatgaaaaagggcgcctcatggcgcccttgatgttattgacgtagatagacctgcggcagcgacgcttcgggatgatgcaccacgccgagatcggcctgataccagcgggtgagaatgtcggcctgcagcacttcctgcggcgtgccgctcgccaccaagcggccctgatgcaacagcaggatccgatcggcgtacagcgcggccagattgagatcgtgcagcacgcagcagacgcccagcggctgttggcgcgtcagcgagcgcagcaggcgcagggtgtgctgctggtgatacaggtccagcgccgaggtcggctcgtcgaggaacagccaggcgggggacggttgcggctgccacagctgcgccaacacccgcgccagctgcacccgttgttgttcgccgccggaaagctgacggtagtcgcgctgcgccagcgccaggcagtcggtttgttccatcacctgttggagcgcctgatgctcgtcgcgtttgccgtgcggcgcccgccccatgctgaccacttcttccacgctgaagggaaacgccagatcgctgtactggcgcatcacggcccggactttggccaactgctgcggcgcccagtgttccagcgggcggtcgagcagccggcattcgccacagtccggcgtcagatagccggtcagcaagcgcaacagcgtcgattttccggcgccgttagggccgataatcgccaccatctcaccgccggcgaggctgagtgaaacgtcgttgatcaggcggcgcgtaccgaggctgtagcgcagctctcgggccgtcaggcaggcggcgttatccaccggttcgctcccgctggcgcatcaccagccacaagaagtaaggaccgccgatcaggctggtcatcaaccccaccggcatttcggccggcgccaccagcgtgcgcgccagcgtatcgctgaccagcaacaggcaggcgccgcccagcgcggagcagggcagcagccagcggtgatcgccgccgaggcgcatgcgaaccagatggggcaccaccagaccgacgaagccgatcacgccgctcatcgccaccgccgcgccgatcagcagggcgctcagcaacagcagctgcagcttggcgcgctgtacgttcaccccgaggtagtgggcctcttcatcccccagctgcaacaggttcagccggcgcgcctgcagcagcgtcagcagcgccgtaggcaaaatcagcgaggcggaaaccgccagcgtcggccactgcgactggctgaggctgcccatcatccacagcgagaactggcgcagctgttgatcgctgctgacgtaggagagcacgccgatggccgccatgcacagggcgttgatggcgatgcccgccagcagcagtcgcgacagattgccgtgcccgctgcggctgatgccgtagatcaataacgataccagcaggctgccgaggaacgccgccagcatatggccgtacagcgcgatcgtcaccggcaacgccagcggcatcacgatgaacagcgcgacaaacagcgcgccgccgctgctgatgcccagcaggctaggatccgccagcggattgcggaacagcccctgcatcacggcgccggacaccgccagcgcgcagccgatcaccaccgccagcagcacgcgcggcaggcggatattcagccagatgtgccaggcggcatcgctgaacggttcgcgccacagggtccgaaacgacagcgtcagcgcgccgagattagcggcgaccagcgccagcagcgtcagcagcaccagcagaccgatgatggcccactgaggcgaggtgcggcagcgcattacttttgctccgccgcgtggcgcagcttggccagcgccgccggcgtttccagaccgaagcccagcagcgccatgtcatcgacgatcagcacgcgccgctgtttgcccgctggcgtcagcgccaggcccggcagcgtccacagctgctgttcgccgccgagggtgcgcacgccgtcggtggtgaccagcaacagatccggcgcgctggcgatgacaccttcctgcgacagcgggcggtagcggtcaaagccctgcatggcgtttttcaggccggcggcggcgatcaccgcgtcggcggcggtgtgttgcccggccgccatcggtgtaatgccgccgtggctcatgacaaacaacaccttcaccggcagcggagaggtgtcgaccgccgccagctgttgttgatagcgctcgctcagctgtttgccttgctcaacgcgttgcaacgcggcggcgatcgcggcgatcttctgcggcaccgcctgcagggtggtgtcacccggcacgctgaccactttgacgccgctgtccgccagctgtttgagcaccagcgccggctgtgccagctcggtcgtcagcaccagcgtcggcttcagcgccagaatgccttcggcgttcagctggcgcatatagccgacgtccggcagctttttcaccgcttccgggtgcaggctggtgctatcgcgggcgatcacgtcgtcgccggcgccgagcgcaaaggcgatttccgtcacgtcgccgccgatcgagacgatgcgctgtgccgccgcggcggtgagcggcagcgccagcgtcatcatcagcgccaggcggcggattaaggaagatttcatgcggcgatgtccttggcggcgagcgcggcaacctgctcgcgccactgggtttgttccggctgaccttcggtacgctggccatacagctgcgcaatctgcgtgccgtcggcggcgaacagctccaggctggtgacgatgccgtccttggtcggtttgcgggtgatccagctttcggcgatggcgccttcaatcagatgcagcgtgaagcggcgattgaacacgttgatccaaccttcctgcggcatcaaacgttcgatctggccggtgaaaatctgcacgcagccgcggttgccgacgaatatcatgatctcgttttgctgctgctgcgccgcttccagcagctgcgacagcgcgctgttgtccacctgataggccagatcgtcgccgacggcgcggaaggcctgctggcgcgtgagtttattgcggctcagcagctggaagaactggtgaacgtcggtcatcgcgcgccattcagcgtcgattttggcatgatcctgcgtcgtttcatccgaggtgctcgcctcggcgggctgcagggccagcgccgggttttcttcgctcagatggcgctccaccagcgccatccaggccggcagatcggtttcttcggtggtatagaccttgtgcagcgcatcgccctgttggtcgaagaactgaatgctgtggcgcacgccgcgcttgttggtttcgctcatggcgaagacgctggtccagtggttgaggaacaggcgcagatccagctcgcgcgggttgaggatcagcccggcgtggccgtttaggtgctggttgcggtagcggcccatctgctcatgcaccgcatagctgttgcgggtgatggatttggtgacgcccacttgctcaagctcggtcagcagggtgcgcgcgtcggcctgcaggcggcgggcgtcgtgaccgacgcgggcgtgcgtcagctccgcttcgctgacgccaaggatcgccgccagatcgcgggcgtatttgccggggtgatcgattttagcctgttggtagcgttcgtatagggtgttgctcatgccggattctcctgcgctgtaatgcgaacggcggacaatcgggttgtccgccagatagtcaaatgattaccactggtagctgaccagcagtttggcgttgcggccatcctgcgggatgccctgcggcgagtaatattctttgtcgaaggcgttgcccaacaccacggtggtggtcatgccctgcagacggtcgcggcccttgtagctcagatagaagtcgttgacgccataaccggcttgttcggccgtgcctgtctccacgcgcgtcgcgcgttcggcgaaggtggcgacccagccggcagacagaccggtttcgcccagcggcacgtccagcgagctggtgacggtgtccggattgatgctgcttaaccagtcaccggtcgcttcatttttgccacgggtgcggttgtaagccaaatcccagccgaaccagggggttttatagctgagcgtagcgtcccatccccagattttggcgcgatcgacattggtcgagaaggtggtgcaactgatgcagtaagggccgcgcggaccgcgtcccagttccatcgtgacatcggtggtgatgtagtccttggctttggtatcgaaatagctggctttgaactgcaggctatcatcggccagcatcaaatcatcgaaacgcagaccaaacccgtactcttgggtctcgttggtttccggcttcaaattcgggttaggcacccaatagttggtgatggtggttggccccattggaattgagaagtgcttggagtcgttgtacatctcacccatcgttggcgcgcggaacgcctgagaataggagccgaacagcatcagccagtcggtaggcgtaatgctgactgcgccgcgtgaggaccatttgttcgcatccacatcggcatagccgtcgcttgagcccttgtaattgtcatagcgggtgccggcgagcagggtgacgggcagatcgcgcagcgtgatttcgtcctgcagccagcctgaagcgaaattgatttttgcgtgcgggaaactttcggtagcgccgcccggcgtttgctcctgtttgtaggcctcggtgccgtaggtcagcagatgtgaagcgaaagtatccgcaaacaggcgcgtgcggttttcgagtttgacgcctttcgtggtttgtttacgcgcttcatcctcgctgccattggcgtgagcgttaattttcacgtctgaataatacactttcgcttccgcatccagccaatcctggccgatcggcttcagtttgtaactcaatgccgcgtcgcgttgaatcgtcgaacgatcggtcattaagtttccactggagctggctggtgtttgcgggtttttcggctcctgggcgctgttgttgtagtagcgcaggttgccgcttagcgactggctattgtcgatcttccaggtgcctttagccagcacgttgctgatggtttcgtcgttaggcgcatcgaagccgttgccctgacgaagatcgccgacgtcgcgggtgccgaacgacagcaggccgtcgaggttatcggtcttgccgtaggcgctggcgcccatgcccaggctgtggtcgccggtgccggcggtgccgtagacgcggaacccgctatcctggcccggcagcagcagatcggcggcatcgacggtctcataagacactacgccacccaacgcgccgctgccgtacagcaacgcggaggggccgcgcacgatttcaatgcgtttcactaacgcaggatccaaaaaagtgccgttaatatggccggtatcggtcccctggcggatgccgtcaactaacgtcagcacgccacgtcggtcgtaaccgcgcatcatgagatcctgcccattgctgcgcccggaacccgtgacggtaatgcccggcacgcgccgcagcatatcggcggcggtgcctgcagtttgactttccggcgagttgccttcgatgaccgtgaccatcatcggcgcttcaaagctgctgcgttggttgccggtggcgaccacggtcatggtctcgtcggcgtttttggccgctgccgcgttggaagaagttgttgtgctggtgttttgtgccaaggccaccgtaggcagagcgcaggcaatcgccagactcaacgcggaaaaacgcagccgggtggaaaatgtcagaggcatggtgcaactctccgtatgtaataaaacatatcaatagatttgctggctgcctggatcaaacgatcggggtggctggcgtttgagggttctgtggttatttggtcaggatcaatttcccggctttggtctgccgcagctgatagcgctggccctgatgggtaatgaacgcgatgccgtcggcgccgagcagctgtgcgctgtcgtagctgggcggcgcgtttgcgctgtgctcggtcggggccgcggcggcaggggttggcgtgttggcagtatccatcatcattgtgcttataaaacaggttattaaatggtaattaatatcaaactgagaatcattatcatgtgaaggaaaggttacatcaaggaaaattttcttaccgatggaacctttttgtcgaacggacatccggcggcgggccgagcgcactcggcccgtaaaaaaggggcgttatttcagcagggtttcgatgcggtcaaacaggcgttcgggcttggtgatcggcgcaaagcgcgtcacgcgctggccgtcggcggtgagcaggaatttggtgaagttccatttgatgcggcggctgcccagaatgccgggcgccaggcgtttcagctcattgaacagcgggtgggcgccggggccgttaacgtcgatcttgctgaacagcgggaaactgacgccgtagttgaggctgcaaaaattggcgatctccagcggactgcccggctcctgagaaccaaactggttgcaggggaagccgagcaccatcaggccgcgctcgcgatagtatcgccacaaattttccagcccgcggtattgcggggtgaagccgcacttgctggcggtgttgaccaccaggtaagcgcgcgccgggaaatcgcccagcgttttttgctcgccctgcagcgtgacgcagggaatggataacagagagtgaatcatgccggggctcccagtgcatttcggcgggtgctaaagcgttgcaatcagtatagatgagcgggacagaagggagaaagccggggcgaggccccggtctatgttgcgtcagaaacggctatcgaccgcatccgccagcatcgccagcaactgttcgctgtcggaccagctcaggcaaggatcggtgatcgactgaccataggtcaacggttggccggcgacgatcttctgcgtgccttccaccaggaagctttccgccatcacgccggtgatggcggcagagccggcgcggatctgctggcagacgttgtcggccacttccaactggcggcgatgcattttctgacagttgccgtggctgaagtcgatcaccaggtgctccggcagatcgaactcgcgcaggctgtcacaggcggcggcgatatcgctggcgtggtagttcggcgtcttgccgccgcgcatgatgatgtggccgtacgggttgccgctggtctggtagatggtcatctggccatgtttgtccggcgacaggaacatgtgcccggcgcgcgccgcgcgaatggcgtcgatggcgatgcgggtattgccgtcggtgccgtttttgaagccgaccgggcaggagagcgccgaggccatttcacggtggatctggctttcggtggtgcgtgcgccgatggcgccccagctgatcagatcggcgatgtattggccgaccaccatgtccaggaattcggtggcggtcggcaggccgagctggttcacttccagcagcaggcggcgtgccatttcgatgccgcggttgacctggaaggtgccgtccagcgccggatcggagatcaggcctttccagccgacgacggtgcgcggtttttcgaaataggtgcgcattacgatctccaggcgatcctggtagcgctcgcgcagggcgttcagccggccggcgtaatcgacggcggcgtcgagatcgtgaatcgagcaggggccgatcaccaccagcaggcggcggtcttcaccggtgaggattttttcaatgcgtttacgtgacgctgtcacgttatcggcgatggccgccgagatcggcagcttgtccgccaacgcttgcggcgtgacgaggctgtcgatgcgcgcggtccgcagttcatctgttttgtgcatgttgttccctggaaactgttcttctctgcggcaggagtgccgggaagtgatggcgatcacaataacgcaaaaagcgctgaattcaaccgtagagattgcgttctgttgatcaaagccgcgaaaaaaagcacaaaaaaatcagctgctgctgaaataaacggcaggcggcggggcgcggcggccccgcgaggaaaagatcagaacatgcggcggctcatgccaaggatgtcgaggattttggtggagatctcttcgaccgaatagttggtggtattgaggtagcggatctggtttttgcggaacagcgcttcgacctcggcgatctccatgcggcactgacgcaatgaagcgtagcggctgttttcacgccgttcttcgcggatcgccgccaggcgctccggatcgatggtcaggccgaataatttatgctgaaacggtttcagcgaggccggcaggtgcaaattgtccatatcgtcggcgataaacgggtagttggcggcgcggatgccgaactgcatcgccagataaaggctggtgggggttttgccgcagcgcgacacgccgagcaggatcacctgcgcctgatcgaggttgcgcagcgaaatgccgtcgtcatgcgccagggtatagtcgatggcggcaatgcgcgcgtcgtacttgccgaggttgctggcggtcaggccgtgggtgcggttcggcaccggcgtcggctccacctccagctcaccctgcagcgggccgaccagcgcctgcacgatatcctgacagaagccttggctctgaacgatcacgtcgcgcacttccggcgagatgatggagtaaaacaccagcggccgtacaccggtttcattatagatatcatcgatttgttggcgaactgcgcgtgcgcgcgcctcggtttcgacaaacggcaaggtgtacgtggtcgccgtgaccgggaactgcgacagcaccgcgtgccccagcacttcggcggtgatcgccgtaccatccgaaatataaaaaacgcttctttccacccgaggctccttacctgaaaacggtgttcctgctgtcatcactgccaatatcatgagccgcagacgatccgccggtaaaggggcgagggaaaaaattgtgacggcggggcggtaaaccgccttgcggcggcgcgcgaagaaaagcgcgctttggcggcggcagaaatcgcggcgcagcgaccctgttcgagccgaaacgtaaatttgccgctattttcaccaaaaacgatagcgtttgcgtggtcattaaaacagaattttaaaaagagcgtaatttgttgagaactaagcttttcgtgcgattgggaacggttcccaggcaaatcagccggttaggacattctcttaaaaaccactttcttcagtgggttgatcgattcacctttccattttccccggatcagtgtgctagtctgattcggctccgtgttagcggtgccgtaaagcaagcgaattaaatccgtctttaccctactgatagcaataaggattgtctcgatgtccaacaatggcccagacttgcgtaatgtgctttggtacaaccagcttggcatgcacgacgttgaccgtgtcggcggcaaaaatgcctccctcggtgaaatgatcaccaatctttccgatttgggcgtggccgtgcctaacggttttgccaccaccgcacaggcgtttaacgattttctcgaacaaagcggtgttaaccagcgcatctatcagttactggatcagactgacgttgacgacgttgcccaactggccaaggccggcgcccagatccgccaatgggtgatcgacacgccgttccacgccgagttcgagcgtgaaattcatcaggcttaccaacagctcgccgacggcgaaccggaagcttcctttgcggtgcgctcctccgccacggcggaagacatgccggacgcctcctttgccggtcagcaggaaaccttcctcaacgtgcagggcatcgacgccgtaatggtggcgatcaagcacgtgttcgcgtcgctgttcaacgatcgcgccatctcttatcgcgtgcaccagggctacgatcaccgcggcgtggcgttgtcggccggcgtacagcgcatggtgcgctcggatctggcctcctcgggcgtgatgttcaccatcgacaccgagtccggctttgatcaggtggtattcatcacctccgctttcggcttgggtgaaatggtggtgcagggcgcggtgaacccggatgagttctacgtgcacaaaccgacgctgcaaaacggcaagccggcgatcgtgcgccgtaacctgggttcgaaaaagatccgcatggtatacgcgccgtcgcaggatcacggcaagcaggtgcgcatcgaagacgtgccggaagcgcagcgcagccgtttctcgctgacggatgaagaagtgcaggcgctggcgcagcaggcgatcctgatcgaaaaacattacggccgcccgatggatatcgagtgggcgaaagacggccataccggcaagctgctgatcgtgcaggcgcgcccggagaccgtacgctccaacgagcagaccatggaacgctaccagctgaacggcaccagcccggtgctggtggaaggccgcgccatcggccaccgcatcggcgccggtccggtgaaagtgatccacgacatcagcgaaatggatcgcatccagccgggcgacgtgctggtgaccgacatgaccgacccggactgggagccgatcatgaagaaggctgccgcgatcgtcaccaaccgcggcgggcgcacctgtcacgcggcgatcatcgcccgtgagctgggtattccggcagtggtaggctgtggccacgccaccgacgtgctgaaagacggccagaaagtcaccgtctcctgcgcggaaggcgacaccggcttcgtttacagcgacatgctggacttcagcgtgcagagctccgaagtgaccgagctgccggatctgccactgaagatcatgatgaacgtcggcaacccggatcgcgctttcgacttcgcgcgtttgccgaacgaaggcgtgggcctggctcggctggaatttatcatcaaccgcatgatcggcgtgcacccgcgcgcgctgctggagttcgaccagcagacgccggcgctgcaaaatgaaattcgcgcgctgatgcagggttacgatcacccggtcgagttctacgttggtcgcctgaccgaaggcatcgcgacgttgggcgccgccttctggccgaagcgcgtgatcgtgcgtctgtccgacttcaaatccaacgagtacgccaacctggtgggcggcgacaagtatgaaccgcacgaagagaacccgatgttgggcttccgcggcgccggccgttacgtggccgacagtttccgcgattgcttcgcgctggagtgcgaggcggtgaaacgcgtgcgtaacgatatggggctgaccaacgtcgaaatcatggtgccgttcgtgcgcaccgtggcgcaggcggaagcggtggtggccgagttggcgcgtcaggggctgaaacgcggcgaaaacgggttgaaagtgatcatgatgtgcgaaatcccgtccaatgcgctgttggcggatcagttcctcgagcacttcgacggcttctccatcggctccaacgacatgactcagctggcgctggggctggatcgcgattccggcgtagtgtcggaactgttcgacgagcgcaacgaggcggtgaaagcgttgctgtcgatggcgattcaggcggccaagcgccacggcaaatacgtcggcatttgcggccagggcccgtctgaccatgaagacttcgccgagtggctgatggagcagggcatcgacagcctgtcgcttaacccggacactgtggtgcagacctggatcaatttgtcgaaaaagaaataatgtctcggcctcactgaggcattaacgtcgggccgcagttaacgctgcggcctttttatttccgaatgtaaataacggcgcgtaaaataatcaattcgacgaaaaaagaataaaaaaaagcccaccgtaggagatgggcaaagactacacacagcaattcacatgtatggcattacattgttcagaaaggttgctttaaaatcagtgatttgaagcaatagatggccataatactagatttttgaacgcgactagtcattaagaatcatcctaatcgatagcggcatcacattttatttgcgggagttatctcttttttccgtttgcaacaaacagggatttacattgcacctttcattcgccgtaccgtaatcaatatagggcggcattatattgggcggagatattactcgaatgaggtaggaataatgacgggcgtgaaaagttccgcccgacggtgcgggcggaaggggggattagcgtttttccagctcgtcgatgacttgctccggcgcggaggtcggctccggcgcttcatccatccaggcggtcagcaggcgataagacaccgccaacaccaccgggccgatgaacaggccaatcatgccgaaggccagcaaaccgccgataacgccggacaggatcagcagcagcggcagatcggcgcccatgcggatcagcaccgggcgcagcacgttatccagcgtggccaccacgcagctccagaccagcagcacggtgccccaggtggtgtcgccgtgccagtacagccagatgatggccggcaccagcaccaacagcggccccaattgcgccacacagcagatgaagatcagcatcgtcagcagagtggcggcaggaatgccgcttaccgccagaccgatgccgcccagcaccgactgcaccagcgccgtcaccaccacgcccagcgcgacggcgcgaattgcctggccgcccagcagcaccgccgcatcgccgcgcgcagaaccgaggcgcaccgcaaagtggcggatacccagcgccacctgttcgccacgtgcatacaacaaggcgctgaacagcagcatcagtgcgcagtgcagcagcaggcggccgatatgcgccgcctgcgccacgaaccaggtggcggtttggccaaagtacggctgcaccttcgccagcagcgcggcgccgccggcgttaaccagcgtgtggtagctggtatagagtttgtcgccgatcatcggcacggactgcagccaggcgagatcgggaatatgcagtttgcccggcgaactggcccaggcgatcagcggcgcgctgttatccaccacgctgctgatcagcagtgagataggcagaatgaacagcaggatcagcagcagggtcatgaccaacaccgccagcgaacggcggccccacagcagcttttgcagtttgagcagcagcggccaggtggcgatcaccaccatgcccgcccaggcgaagccgagaataaacggttggatcacccaaaaacaggcgacgatcatgatggcgataaacagcacgccgaaaataattcgcggtaagtcgtaacgcgattgcgggagtggcatcagtgggttctcatcctggtcaattaaatccctggcaccggcgaatcggggtgcctgtcggtcggtttctcaccgccgggcggccgcctgtggcggcgttcgcagggcggtaataatgtgaatgccttcactaaacgagtatgttagtttttagtgtcactaaaaaatagggtgggtctgaattaaaggcccgattcagcgtacatcagcgcataaaaaatagacggacagggtcaaaaaagcgaatgatcccacagatttctcaggcgcccggcctggttcaacgggtgctcgactttttggaagcactgaagcaaaacggattcaacggcgataccgccaccagctatgccgaccggctgacgatggccaccgacaacagtatctatcagctgctgcccgatgcggtggtgttcccccgttccaccgccgacgtggcgctgatcgcccgtctggccggagaagagcgcttcaatacgctgaccttcagcccgcgcggcggcggcaccggcaccaacggccagtcgctcaataccggcatcgtggtcgatatgtcgcgccatatgaaccgcattctggagatcaacgtcgaacagggctgggtgaaagtcgaagccggggtgatcaaggaccagttgaatcaatacctgcgaccgttcggctacttcttctcgccggaactgtccaccagcaaccgcgccacgctggggggaatgatcaacaccgatgcctccggccagggctcgctggtgtacggcaaaacctccgatcacgtgttggggctgcgggcggtgctgctgggcggcgagatgatcgatacccgcgccatgccgacggcgctggcggaaacgattgctctggaagagaccgccgaagggcgcatctaccgcacggtgctcaaccgctgccgcgaacagcgcgcgctgatcctggagaaattccccaagctcaaccgcttcctcaccggttacgatctgcgccacgtgctgagcgacgatctgcaaaccttcgatttgacgcgtattctgaccggcgccgagggcacgctggcgtttatcaccgaggcgcggctggacatcacgccgctgccgaaagtgcgccgcctggtcaacgtgaagtacgattccttcgactcggcgctgcgcaatgcgccctttatggtcgaggccaaggcgctgtcggtggaaaccatcgattccaaggtgctgaacctggcgcgtgaagacatcgtttggcactcggtgaacgaactgatcgccgacgtgccggataaagagatgctcgggctgaacatcgtcgagttcgccggcgacgatcgggcgctgatcgacggccagatggaggccctgtgccaacggctggacgaattgatcgcgcagcggcagggcggcgtgatcgggtaccagatctgcggcgatctggcgggcatcgagcgcatttacaacatgcgcaagaaggcggtcgggctgctgggcaacgccaaagggcgcgccaagccgattccgttcgccgaggacacctgtgtgccgccgcaacatctggcggactatatcgtcgaatttcggcaactgctcgatgaccacaatctgagctatggcatgtttggccacgtcgacgccggggtgctgcacgtgcgcccggcgctcgacatgtgtgacccgcagcaggaagtgctgatgaagcagatctccgatcgggtggtggcgctgaccgccaaatacggcggcctgctgtggggggagcacggcaaggggttccgcgcggaatacagccctgaattcttcggggaaacgctgtatgaagagctgcgccgcatcaaggcggcgttcgatccggataaccgcctgaacccaggcaagatctgttcgccgctggcggtggatgcgccgatgatgcaggtggatgcggtcaaacgcggcaccttcgatcgccagatcccggtcgaggtgcgcacctcgttccgcggcgcgctggagtgtaacggcaacggcctgtgcttcaacttcgacgtgcgcagcccgatgtgcccgtcgatgaagatcagcggcaaccgcattcattcgccgaaagggcgggcgacgctggtgcgcgagtggctgcgtctgttggccgagcagggggtcgatccgctggcgctggagaaacagctgccgcagcagcgcctcagcttgcgcggcctgatcgagaaaacccgcaacagctggcacgccggcaagggtgagtatgacttctcgcacgaagtgaaagaggcgatgtccggctgcctggcctgtaaggcctgttcaacccagtgtcccatcaagattgacgtgccgggattccgttcgcgcttcctgcagctttaccacactcgctatctgcgcccggtaagcgactacatggtcgccggcgtggagagctataccccgttgatggcccgcgcgccgaaggtgttcaacttctttttccgccagccgtggctgcgggagatgagccgcaacgccatcggcatggtcgatctgccgctgttgtccagcccgacgctgcgccagcagctgtccggccaccgcgcgaccacgctgacgctggagcagttggaagggctgagcgccgagcagcgcgcagaacacgtgttgatcgtccaggatccgttcaccagctattacgacgccaaagtggtggcggactttgttcggctggtggagaagcttggctataaaccggtgctgctgccgttctcaccgaacggcaaggcgcagcatgtgaagggcttcctgacgcggttcgcccgcaccgcgcgcaaaaccgccgatttcctcaaccgtgtggcgcagctaggcatgccgctggtgggcgtcgatccggcgctggtgctgtgctaccgcgacgaataccgcgagatcctcggcgccgagcgcggcgatttccaggtgcagctggtgcatgaatggctgcagcagcggatcgcggatcgtgccgaacagccggcgaccggcgagccgtggtatctgttcggccactgcaccgaaaccaccgcgttgccggccagcggccaacagtgggcggcgatcttcgcccgcttcggcgccaaactggagagcgtcagcgtcggttgctgcggcatggcgggcacttacggccatgaagccaggaacctgcaaaactcgctcggcatttatgagctatcatggcatccgacgctacagcgtttgccgcggcagcgctgcctggcgaccggctattcctgccgcagccaggtgaaacgcatcgagggcaatggcgtgcgccacccattacaggcacttctggagatgattgagtgaaattgtggaaacgtgaaacatcgctggagcagctgaaccgcgccggcgacggctgcatggtcagccatgtgggcatcgagtttacccaactgggcgaggatttcctcgaggccaccatgccggtcgatagccgtacccggcagccgttcgggctgttgcacggcggggcgtcggtggtgctggcggaatcgatgggatcgatggccggctacctgtgcagtgagggcgagcagaaagtggtggggctggagatcaacgccaaccacctgcgcgcggtgttcgatggccaggtgcgcggggtgtgccgcgcactgcacgtcggccgtcgtcatcaggtgtggcaaatcgagatcttcgacgcgcgcgatcggttgtgctgcacctcgcgtctgaccacggcggtcatcgactgatccccgccgctttccgcaggcgctcggcctgcggagcctttcgctttacagctgaaacggcacgcgtttgacgaagtccttctgaaacgcgttcgccttctcccaggtgccttccattgcatatttttggcagatcagcgtcagcgtatggcgggcgaagtggtagctttgcacccgaaacagctggcaacgctgtgggttgttgatctcgacgatcagccggttgtgcagcttgctgagcgcgtgcaggtagctgtcgtcgtcgccgttctccagacacaaattggccatggtaaggctgacgctgttgtaccgcttcaggtggtcgatattgcattccgggcgccgtagcgccgcttcggccatgtaaaagtccaccgtggcgtcgcgcacgctgaatttgtagtcatcaatcttgcccagcaaccatgcgttgatcgaaagagtcattggcttcgcgctcaaattcaaattgaatgataatcattatcatataaactgccgcgttgccgatcaatccccggcgtggcgttttttcattgcgcggggtgtaaaaggccgccgacgacccaacttgatgctgagcgactaaactttaacctgagggcgcgcgcttgcgctgcgccacgaaatgccgataaacgcacatttacgacagacagaatgcagaaataggtattttctatgaatgtttagatcggcaacgtaccgcggcgctgtaacgctgacgggccaccggggagtgcggtacggtgatgcaggataaataacaaattcatagggatagcatgcacaccttgccgccagacgccgcaagccgccacggatgtcccgctggcttgccgcacgccgcagcgaaaaaccgcgcttgcggcggatacccccgcaaaacaaacggttgaagtgataatcgttatcactaacatataagcaacccagattggctgtggccaaacacgagtgtgaggtagaccctatgcaaacggaaaatgtcggcactttttctctggatgaaaatgtctggcaaggcatttcgctcagcgacagcgccgtacgacaaataaccaaactgatgcagcaggatccgcaggtgaaagggctgcagctaggggtgaaacaatccggctgcgccggctttgcctatgtgctggatctgacccgcgaacccgccgatgacgatctgctgtttgagcgcgacggcgccaaactgtatgtgccgctgaaggccatgccgttcatcgatggcaccacggtagattacgtccgcgaagggctgaatcagatattcaaattcaacaaccctaaagctcagcatgcctgcgggtgcggcgagagctttggcgtttgagcgatgcaatcaacatgacacgaagcaatgtagaaatgcctaatgaagtgcaggcttgggtcagcgaaggtcgctacaaagaaggtttcttcacccagctggctaccgatgagttggccaagggcatcaacgaagaggtggtgcgcgccatctcggccaagcgcaacgaacccgagtggatgctggaattccgcctcgaggcttatcgcgcctggctgcagatggaagagccgcactggctgaaggccaattacgaacgcctgaactatcaggactacagttactattcggcgccgtcctgcggcagctgcgacgatgcatgcggttcgcaacccggcgccgagcagcaaccgggcgcggcgacggaaaaagattacctgaccagcgaagtggagctggcgttcaaccagctcggtgtgccggtgcgcgagggcagcgaggtggcggtggacgccatcttcgactcggtctcggtcgctaccacctaccgtgaaaaactggcggagagcggggtgatcttctgttcgttcggcgaagcgatccaggaatatccggatctggtgcgtcaatacctggggcgcgtggtgccgtccaacgataacttcttcgctgcgctgaacgccgcggtggcctccgacggcaccttcgtctatgtgccgaaaggggtgcgctgcccgatggagctgtcgacctacttccgcatcaacgccgccaaaaccggccagttcgagcgcaccatcctgatcgccgacgaaggcagctacgtcagctatatcgaaggctgttccgccccggtgcgcgacagctaccagctgcacgcggcggtggtggaagtgatcctgcataaagacgctgaagtgaaatactcgacggtgcagaactggttctccggcggcgagagcaagggcggtatcctcaacttcgtcaccaagcgcgcgctgtgcgaaggcgccggttcgaaaatgtcctggacccagtcggaaaccggctcggccatcacctggaaatacccgagcgtgattttgcagggcgacaactcgatcggcgaattcttctcggtggcgctgaccagcggccatcagcaggcagataccggcaccaagatgatccacatcggcaaaaacaccaggtcgaccatcatcgccaaaggcatctccgccggccacagcgagaacacctatcgcggcctggtgaaaatcctgccgggggcggaaaacgcccgtaattttacccagtgcgactcgatgctgatcgggccggacagcggtgcccacacgttcccttacgttgaagcgcgcaacaacagcgctcagctggagcacgaagccactacctcgaagatcggcgatgaccagctgttctactgcctgcagcgcggcatcagcgaggatgacgccatttcgatgatcgtcaacggtttctgcaaggacgttttctccgagctgccgctggagttcgccgtcgaggcgcaaaaactcctggccatcagcctggaacacagcgtgggttaatcgccgcatttttagcgccgtcggcgctatctgaggacacagcatgttaagcatcaagaatttgaaagtcagcgtggaaggtaacgagatcctcaagggattggatctggagatcaaaccgggcgaagtgcacgccatcatggggccgaacggctcgggcaagagtacgctgtccgccacgctggccgggcgtgaagagtacgaagtgaccgaaggggaagtcaccttcaagggcaaggatctgctggagctggatccggaagatcgcgcgggcgagggcgtgttcctggccttccaatacccggtggagatccccggcgtcagcaaccacttcttcctgcagacgtcggtcaacgcggtgcgcaaataccgcgaccaggagccgctggatcgctttgacttcgccgatttcatcgaagagaaaatcgcgctgctggacatgccggccgatctgctgacccgttcggtcaacgtcggcttctccggcggcgagaaaaaacgcaacgacattctgcagatggcggcgctggagccggatctgtgcattctcgatgaaaccgattcgggcctggacatcgatgcgctcaaaatcgtcgccaacggcgtcaactcgctgcgggacggcaagcgcgcctttatcatcgtcacccactatcagcgcattctggactacatccagccggattacgtacacgtgctgtcccaggggcgcatcgtcaaatccggcgatttctcgctggtgaaacagttggaggagcagggctatggctggcttaccgaccaacagtaattcaaacgcgctgcagcaactgtatcgcctgttcgaaggccgcggcggcgagcgttcgccgcatgcgctggcgcactggcagcaggcgctgcgcctcggctggccgacgcgcaagcatgaaaactggaaatacacgccgctggagagcctgctggagcagcaattcctcgagccgcagcccgccccggtgagcgcagagcagctcgatgcgctggcgctcggcatcgatgcctgtcggctggtgtttatcgacggccgctacagcgccgcgctgagcgatggcgacctgggcgactaccagttcgagttgaccgcctatggcacgccgcaggcgctgccggagccgatccagccggagatttttctgcacctgaccgaaagcctggcgcaggaaaccagcctgatccgcctgccggccggcaagatccctgcacgcccgctgtatctgctgcacatcagcagcggacgcggcgccgccggggaagtgaacaccgtgcatcaccgccatcatctggagatcgggcgcggggctgaggcggaagtgatcgagcactacgtcagcctgggcgaggccgcacatttcaccggcgcgcgcctgaccgccaatgtggcggacaacgccgggctgttgcactgcaagctggcgtttgagagccagccaagctaccactttgcccacaacgatctggttatcggccgcgacgcgcgggtgaaaagcgacagcttcctgctgggcgccggcctgacgcggcacaacaccagcgcgcagttgaacggcgaaggcgcgaatctggtgatcaacagcctggtgctgccggtgggcaaagagatttgcgacacccgcacctatctggagcacaacaagggctattgcgaaagccgccagctgcataaaaccgtggtcagcgatcgcggcaaggcggtgttcaacggcatgatcaaagtggccaagcacgcgatcaaaaccgacggccagatgaccaaccataacctgctgttgggtaaggtggcggaagtggataccaagccgcagctggagatctacgccgatgacgtcaagtgcagccacggtgctaccgtggggcgcatcgatgaagagcagctgttctatctgcagtcgcgcggcatcgacaagcacgcggcgcagcagatgatcatcttcgccttcgccgccgagctgaccgaaggcatcgccaacgacaccatccgggaacgggtgctggcgcgcatcgcccagcgcctgccgggggaggctgcatgagttatccgattgaacgcgtacgcggcgatttcccgctgttggcgcgtgaggtgaacggccaaccgctggcctatctcgacagcgccgccagcgcgcagaaaccgcaggcggtgatcgaccgcgagctggagttctaccgccacgggtatgcggcggtgcatcgcggtatccacaccctgagcgccgaggcgactcagcagatggaagcggtgcgggaacaggcggcgcgctttatcaatgctgcctcggcggaagagatggtgttcgtcaagggcaccaccgaaggcatcaatctggtggccaacagctttggccgccacctgctgcagccgggcgatgcgattctcatcaccgagatggagcaccacgccaacatcgtgccgtggcagatgctggcgcaggagcgcgggttgcagctgcgggtgtggccgctgcagccggacggcacgctggatctggctcggttgccggaactggtcgacgcgtcctgtaaactgctggcgctgaccgaggtctccaacgtgctgggcaccgtcaacccggtgcgcgagatcatcgcccgtgccagaaccctgtcaccggatctgacggtgctggtggacggcgcgcaggcggtgatgcaccagcgcgtcgatgtccaggcgctggactgcgatttctacgtgttttccggccataagctgtatggcccttccggcatcggcatgctgtatggccgccaggcgttgttgcagcagatgccgccgtgggaagggggcggctcgatgatccggcaggtcagcctgacggcgggcaccaccttcgccgatccgccgtggcgcttcgaggccggttcgccgaacaccgccggcatcatggggctgggcgcggcgtttgattacgtcgaagccttgagcctgaatgcgatccacgattatgaacagtcgctgatgcattacgcgctcgaggcgctcaagcaggtgccgacgctgaaaatctatggtccggcgcatcgcgccggggtgatcgccttcaatctgggagagcaccacgcctatgacgtcggcagcttcctcgatcagtacggtatcgccattcgcaccggccatcactgcgcgatgccgctgatggcgttttatcaggtgccgagcatgtgccgtgcttcgctggcgttatataatacccgcgaagaggtggaccggctggtggccgggctgcaacgcattcatcagttattaggttaggctggggcgtgtccccggcggtacaaaaggatccccatggcgaatttgccggacaaagataaattggtgcgtaatttctcccgctgtctgaactgggaggagaaatacctgtacgtgattgaactcggcgctaaattgccgccgctggacgaggcggagcggcaggccgccaacctgatctccggctgtcagagccaggtgtggatcgtgatgcgccgcgatgagcaggggcaggtcgagtttcacggcgacagcgacgcggcgatcgtcaaagggttgctggcggtggtgttcattctttatcgccaattgacgccgcagcagatcgtcgatctcgatgtgcggccgtttttcaccgagctggcgctcagccaacatctgacgccttcgcgctcgcaggggctggaggcgatgatccgcgccattcgcagtaaagcggcgcagctggcctgatccataacgccttcatcctcaagactcattgatacctttgctttgtcaatgagtctttacaattcacaattttcctccgggcaacgcgcccaattcagtgatatttcagcagcttaactgttgacgtttcgttgacaatcaatgacggcgattacgttataacgtgttgatttttagaggacttattgcctttgataccagcgttgctagtattaatcaggtattgtctgatttacccaccacctggcgctcgttagccttgtgggcgaaccgtcataaaaaatatagggatgataatgaaacgtgcgttgagtttaatgggcatggtcttcgccaccgtattggccggcacgcaggccgccagtgcgaccgagtacccgctgccgccgccggacagccgtctgatcggcgaaaacaccacttataccgtgccaaacgacggccgcccgctggaagccatcgccgctgactacaagatcggcctgctgggcatgctggaagccaaccccggcacggatccgttcctgcccaagccgggtacggtgctgaccattccgacccaaatgctgctgcctgacaccaagcgtgaagggatcatcgtcaacctggccgagctgcgcctttattactacccgaaaggcgagaacaaagtgatcgtctatccgatcggcatcggccagaccgggatgcacacgccgctggaggtgacctccatcagccagaagatccctaacccgacctggacgcccaccgccaacatccgcaagcgctatcaatcccagggcgtgacgctgcctgcggtggtgccggccggccctgagaacccgatggggctgttcgccctgcgtctggcgatggggcgcggtgaatacctgatccacggcaccaacgccaacttcggtatcggcatgcgcgtcagctccggctgcattcgcctgcgtccgacggatatcgaggcgctgttcaacatggtgccgcgcggtacgcgggtgcaagtgatcaacgatccggtgaagatttccgttgagccggacggcaaacgctatgtggaagtgcaccaaccgctgtcgcgggtggaaagcgacgatccgcagaccatgccgatcgcgttgtctaaagcggagaaagcctttgcggccgatggtcagaccgatcgcgccgtattcgatagcgcggttgtacgccgttctggcatgccggtgctggtcaacgtaggggagagtccgtctgcggtgagtttgacacctgcagcggctcctgcggcgaataagagcccattcaaggcagcgccaatcagttcggtgaactaagtttgcaggattgagcggtcgaagaggggttcagcgtgctgaacctctttttttttgcctgccgtgcaggaacccccctggctggcgaacagacaaaaaaaaacggcgcacaatgtgcgccgttttcaataaccaaagctatcttactttttgtaagcgtgagcttggttgtccagacgctggttagcgcgtgctgcgtcgtctttagcagcttgaacgtcagaacgcattgcgttcacgtcgttgctcagctgatcaactttagcgttcagagtctgaacgtcagaagacagttgatcgattttagcgttgctagagcagccagccagcagagtggaacccaggattaccgcgcccagtaccagtttagtacgattcattataacaccctctagattgagttaatctccatgtagcgttacaagtattacacaaacttttttcgaaagagaataattttttagtgttgaggtgctttattttgatcgttcgctcaaacttgcatctggttttacaaattagttaaaaaaacgagggaaaacagccggcttccatgggactactccgattctttattagctaaataatgagcggatcgcggttgcgttttgagaaaaatagtttactgctgataaaaaaaacgccgcaaagcggcgttttgatcaagacaattatgtcacgttttatattacagcacgtgtaccgaggccgtgttggtggtgccgctcggcaccagcgcgccagagaccatcaccacgacgtcgcctttctgcgccaggccgctggccagggcggcttctttaccgatgcggtagaagtcgtcggtggaggcgatttccttgaccatctgcgggatgacgcccttgctcagcaccagctgatgcgcggtagtctcattggtggtcagcgccaggatcaccgcgttcgggaagtatttacgcacggattttgccgacttgccgccgctggtggcgaccacgatcagcggcgcgtccagtttctcggcggtttcaaccgcgccgcggcacaccgcttcggtgatgcgcagcttgcgacgatcgttcagggtgtcgatacggcttggcatcacgcgatcggtacgctcgcagatggtcgccatgatgttgaccgcttccagcgggtatttgccctttgcgctctcgccggacagcatgacggcatcggtgccgtccaggatggcgttggcaacgtcgccggcttccgcgcgggtagggcgcgggtttttgatcatggaatcgagcatctgggtggcggtgatgaccactttacgcgcacggttacatttctcgatcatcatcttctgggcgaagatcacttcttctaccgggatttcaacgcccagatcgccacgggcaaccatgatgccgtcggacgcttcgaggatttcgtcgaagttgttcaggccttcctggttttcaatcttggagatgatctggatctgctcgccgccgtgggctttcaggtgctcgcggatctccagcacgtcggagcgtttacggatgaaggacgctgccacgaagtcgacgccttgctcgcagccgaagatcaggtcgcgtttgtctttctcggccagcgcaggcagctggatggacacgcccggcaggttaacgcctttgttctcgcccaggtcgccgttgttcagcaccttacagatgacttcgttctcggtcacgttggtgacttccatgccgatcaggccgtcgtcaaccagcacggtgttgccgatcttcaggtcggcggcgaagccggcgtaggtgaccgccacgcgctcgctgttgccgatcacgctctggtcagtggtgaaggtgaaggtttggccggcgaccagcgaggcgtctttgccgccttccagtttcatggtgcgaatttccgggcctttggtatccagcaggatgccggcgttgataccggttttcgccatcacggcgcgcatgttcttgatgcggttgccgtgctcttcatagtcgccgtgagagaagttgagacgcatcacgttcatgcccgcattgagcaggttggtcagcatttcttccgattcggtttttggaccgatggtacaaacaattttggtctttttcatggcggagttttctacaagttgtgatggataaaaaaacgaatttgaccggcgcggtttacgccggtagggaatttgggccgtgcctggtggtgaaaaacatagttaaggataggtgacgacagttgaagtggggcggaaaaattcagcccgcgcgggggcgcggggatgctgcgcaacggggtaagatcacatcgtgttgttattgcgttttcgcagatcaagggctgaaaccattcaactgatagacgttgcgcattataaaggctaagcggcgggaaacaaaataaaaaaccgcggcggtgtggcggatagagcaaaacggggctaaatgtggcgcaaatgcaacgcgttgcgggccgcttgttgcgcaaataaccttgctgtaaatgcaggtttaacgcgtttggggaatttccagcagcgtgccagcgctcaggcagaagcagccgctggcgacgttggccggcagggtaaggctctcaccggcacgtactatccgggtgtcgccgccgagggtgaactcgaattcgccggatatcacccgggtttgcagcgcgtgcgcgggcttttgcagttggccgaaggcgccggcctcgaaacgcacttccgccgccggcgaaccgtcgctcatcacgccttcacggcgggcaaggccattgtcgagcggcaaaaaggcggttttggcggtgaaggtggtcatgtggcgttcctgatggctgatggcggtagttcggcgcaattgacatgaaaaatcgaacggtcgggcagagacgatacaacgggaagtataacgtgacagggagagatgaatcagcaatatggtgcgtccgagtggactcgaaccaccgacccccaccatgtcaaggtggtgctctaaccaactgagctacggacgcatcttttcctgtctgtcatggctgacagcggggacgaatattaacgagctacccgcgcgctggcaaggggaaaagcgcaattttattcggtatttcacgcgattgctgaggttgtgcgcagtccggcgtttttttccgcaaaccgcagcccggccggggaggaaaccggccgggctgcgggttcagcgtgtggatcgctgcaggatgacggtggtcggctgtttctgcagccagcgcatgcgcagcgccatcatgatggcggcgaaggtcagtccgatgataaagccgatccagaaaccgcttggccccatcgccggcaccagcgcatcggttaacgccagcagatagccgctcggcaggcccaaaacccaataagcgataaaggtgatgaagaagatcgcgcgggtatctttataaccgcgcagcacgccgctgccgatcacctggaccgaatccgagatctggtacagcgccgccagcagcatcaactgcgaggccatcgccaccaccgccgggctgtcgttgtacagcagggcgatcggttcgcggaaggtggcggtaaacagcgcggtgcagacggccatggtgatgccgacgccgatggcggagtaagcggcgacgcgcgcgccttcgaccgaaccttcccccagacgataaccgacgcggatggtggcgccgacgcccagcgacagtggcagcacgaacatcagcgcgctgaagttaagtgcgatctggtggccggcgaccgcgacgatccccagcggtgaaaccagcagcgccaccaccgcgaacagcgtgacttcgaagaacagcgccagcgccaccggcatgccgatgccgatcaggcgccttagcgccgcccagtcagggccgccgagatcgccggcctggcgtttgatgtcgcgctgcgacggcgcgcgcttcacgtaccagcgcatcatcaggaacatgatccagtagacgctgccggtggcgacgccgcagccgacgccgcccaactccggcatgccgaacttgccgtagataaagatgtagttgatcgggatattcaccagcaggccgaggaagccgatcaccatgccgggtttggttttggacagcccctcgcactggttgcgcatcacctggaagaacaggtaacccggcgccccccacatgatggcgtgcagatagccgacggctttatccgccaactgcggatcgatgttgtgcatcatgtcgatgacgaacttgcagttatacagcacgacgatcagcagcacagagacgccgaaggccagccagaagccctgacgcacctgatgggcgatgcgatcgcgacggccggcgccgttgagctgggcgataaccggggtcagcgccagcagcaggccgtggccgaacaaaatggccggcaaccagatcgaggtgccgaccgccaccgccgccatgtcggtggcgctgtaagcgccggccatgatggtatccaccacgcccatggcggtttgtgatatttgcgcgatgatgaccgggatagcgagagccaataaactacgcgcttcaattaagtacttctgcacgcatacaccttttctatttatatatgtgggagggagggctgccgcgagaggacaacaattaaaatagcggaattttgtcaaaaagattgtacctgctcggcgtcgttaagcaaacgccgcagataaatagttattaaatgcgcagccattctttttttgccgtcgcggatttggttttcagcgccaactggggcaaactgccggtagcgttttaacctatttagcaagaagaggcacatatgttcaccggtatcgtacaaggcaccgcgccgctggtcgccattgatgagaaacccaatttccgcacccacgtgatcgaaatgcctgccgagctgctgccggggctggagctgggcgcgtcggtggcccacaacggctgctgcctgaccgtcaccgcggtggaaggcaaccgcgtcagcttcgatttgatcaaagaaacgttgcgcctgaccaacctcggcgatctggcgctgggcgacatcgtcaatatcgagcgcgcggcgaagttcaatgacgaaattggcggccatttgatgtccggccatattatctgcacggcggaagtggccaagatttatacctcggaaaataaccgccaggtatggctgcgcatgccggatgcggaattgatgaaatatgtgctgcacaaaggtttcatcggcatcgacggcattagcctgaccatcggcgaagtggtgaataaccgtttctgcgtgcacctgatcccggaaacgctggatcgcaccacgctgggtaaaaaacgcctcggcgacaaggtgaacatcgagatcgatccgcaaacgcaggcggtggtggacaccgtcgagcgcgtgctggccaatcgggaagcgacgttggccgcggcgatggcgccggcgcacaaagactgacagcgattctggcgtgaccgccggcatcgaatcataagcagagaggagaaacgcgtgaagttttatgggaaaacgttgttgttaaccgcgttgctggcgctgagcgcttgcagcagttcgcctgagcagggcgcgggcgcgcaaatggccgatgcggacgatacctgcggcgcttcgcagtatcaaaattttgtcggcaaaccgatgacctcgctggaaggcgtgcggatcgacggcaaggtgcgagccattccgtacaactctgccgtcaccatggatttcaacctgcgccgtctgaacttccttggcgacagcgacgataaaattattcgcgtttattgcggttaacccgcagggttcgaaagagcaaaaaaaaagccccggcgaagatgttgccggggcttttttatcgggaaagcgttcagcgggcgacgcgaatgccgccttcaacgcctttcgggctgaacaccacctgccataactgcagatcgcgcgcccggaacgcgccggcgcaggcgttcaggtaatagctgaacatccgttcgaagcgttcggaatagcgctcggcgagctgcggccacgcctgtttgaagcgctcgaaccaggccatcagcgtgcgatcgtagtcggcgccgatgttgtgccagtcttccatcacgaaatggccttcgctggcctcggcgatatgcctcacggagggcaggcaaccgttcgggaagatatatttgttgatccagggatcgacgttcatgtcggtcttgttggagccgatggtgtgcagcaggaacaggccgtgcggcgccagattgcgctccaccacgtcgaaataggtgcggtagtttttcggcccgacgtgctcgaacatgccgaccgagacaatgcgatcgaactgctggtgcagatcgcggtaatcctgcaacaggatctgcacatccagcccggcgcagcgcgcctgagccagcttctgctgttcggcggaaatggtcacgccgaccaccgacacgccgtaatttttcgccgcataggcggaaaggccgccccagccgcagccgatgtccagcaaacgcatgcccggctgcagctgcagtttctcgcagatcatccgcagcttggcttcctgcgcttcctccagcgtggtggcgtctttccagtagccgcaggaatactgcatgtaaggatcgagcatcagggtaaacagatcgttgccgagatcgtaatgctctttgccgacgatccaggcgcgctttttcgattgcagattggtcaggcgcgcggcggcgatacgcagggtatctttcaggtggtgggggagtttcttctccagcccggcgctgaccacgcgctggaagaacatatccagccgctcgcactcccaccaaccgtccatatagctttcgcccaggcccagtgacccttgctgcaaaacgcgtttaaagaattcgggatttttaacctgaatatcgaaagggcgcgatccgttgatttcgataccggccagaccgagcatttcgtgcgcgatacggtaccactggttatcctggatgctcagatcttctatacacgatgaactcatagcttctccatcaccttcttccgactgatgacccgttaggaaacagcttagacaatttctgcgggtgcatacctataccaacgggaaataagcccgcggcgtctgatatccgactatgaacagaggaaatttaaagaaacggcccgacgcaaacggcgcaggataaacgcccctttaaaaaaagagtgtgacgcaaggcgcgtacacaatagctgattgagatatagagattataaggtgttactttacaaggttgtttttgagtataggcgtgccgaggcgttgactcaactgtaaatcgcactcggcacacatattctttaagtgattattaatcttggcaattatgacgctgagttagcatgttcccgctgtgccttttgctgcgcatcggccgcttttccccgctgcaggaaataacccagcgcggccaggactaccgtagataccatcaccgtcaccgtcgccaacagcggctgggcaataaacgccgacaccagcatgcttgccacaaaacacagccccagttgcagcgtattttgcagcgcggcggctttgccgctgctttccgggaacggcatcagcgcattcgccaccatgatcgggtagccggcgccgttgaccagcgccatcacgcagaatgggatcagcagcgtggtgagcgtcggattggtcagggtcgccaccagatacagcgccaccatgctgacaccataagctaccagcagccacggcagcagagttttgccattgatgcgcttaagcgcggcgcggcagccgtagccgcccagcaggaaggccagcgtttgcggcacatagctcagaccgatgtcgctcgggctatagcccatatcgccgaggatgaacggcgaaccggtcagccaggcgaagaaaccggccgagcaggcggcgtacatagcgacgttgccgctgaacaccggagatttcaacagttgccagaagctgacgccgtttttcggcgcgtcggcggcggggggcgttttggcgcgctctttgagcagcagcgtcggcagcagcagcagcgcggtgatcaccaacagcgcggcgaagatcgcacgccagctggcgtggttcagcagccaggcgccaagcagcggcgccagcgctggtgacagcgccaccagcggcatgatggtggcgaacacgcggttggcctggccttcgcgatagcggtcgaccaccagcgcttgccagatggcggtggcggaacagacgccgacggcctgaataaagcgcagtatccagagctgcacggcattttctacccacagcatgcccaggcagccgagcgcgaacagcgtcaggccaatcaataataccggtttgcggcccagtcggtcggagaggggcccccacagcagttgcgcgaaggcgaagccggccagaaagatgctcaggctggcgctgaccgcgccggcggaaatttgcagttcctcccgcatggcgccgaaggcgggcaggtacatatcggtcgccagataacccagcatgctcaggccggcgaggtagaacataaagccaaaagaatttcgcatggtatttctcgttaatattttagtgtcgcaggtttttagcgccggccagtgtatccggctggatctctgcttgtgaaacggtaatatttgcaaagtgctgttaaaaaaattgaaggcaaagcgatgtggtctgaatattctcttgaagttgttgacgcggtcgcgcgcaccggcagtttcagcgcggcggcgcaggagctgcaccgggtgccgtcggcggtgagctataccgtgcggcaactggaacaatggcttgcggtgccgctgtttgagcggcgtcaccgtgatgtggagttgacgccggccggcgcgctgtttatcaaggatgcgagagttgttatcaaaaaaatgctcgacacccgtcgccactgtcagcaggtggccaacgggtggcgcggccagctgaatatcgcagtcgacatcatcgtcaaaccccagcgcagccgccagctggtgctggatttctaccgccatttccccgatgttgaactgatgctgcaacccgaagtgttcaacggcgtttgggatgcgttggtggacggcagggtggacatggcgatcggcgccacgcgcgcggtgccggtcggcggcggctttgccttccgcgatatgggctacatgaactggctgtgcgtagtcagcccacagcatccgctggcgcagctggcagggccgttaaatgacgatcggttgaggccgtaccctgcgctttgtctggaagacacctcgcgcaatctgcccaagcgcgtcacctggacgctggataaccagcggcggctggtggtgccggactggacatcggcgctcgactgtctgtgcgccgggctgtgcgtcggcatgatgccggcgcatcgggcgctgccgctggtgcagcgcggtgagctgaaggcgttgcagctgcagcagccgtttcccgccagcccttgctgcctgacctggcagcaggataaaccgtcgccggcgatgagttggctgctggcgtatctgggcgatggcgagacgctgaatcaggagtggctgagcgaggcggcgccggaagccgtgcaggcttccggctcaggggattagcggcggtagtcgatgaacggaccgtcggcgaccgaacggcgttccaccagcttcggatgcacttcgatcacctgcgattcttcgcgcttgctgatgatgcgatccagcagcatggtgaaggccatttctcccaggcgctctttaggctggtgaatggtggtcagcgccggagtgaagtagcgggcgttgcgcacgttgtcatagccgatcacggaaatatcctgcggcactcgcagccccagctcatcagcggcgcagatggcgcccatcgccatgatgtcgccgccgcaaaataccgcggtcggccgctgtttttgcgacaggatttggtgcatcgccttgtagccggactccggctcgaagtcaccctggacgatccactcttcgcgaatgtcgatatgcgcttcctgcagcgccttcataaagccctgatgacggccgccgccggtgttgcgcgacagctggcccgggatggcgccgatatcgcggtgaccgcgctcgatcaggtaacggccggccagatagccgccttcgaacgcgttatcgatgatggtgtcggtgaagtcgccgcgcgcagcgccccagtccatcaccaccatcgggatattacggtagtcctccagcatgcccagcagttgatccgggtattcggaacacatgaccagcaggccgtcgacgcgcttttgcgccagcatcgccaggtaggcgcgctgcttgtccagattgttgtgcgagttgcacaggatcagggtgtaacctttgctgtagcagctgttttccaccgcctcgatcacttcggcaaaatagggtgcttcgctcgaggtggccagcaggccgatagacttggtgtgattgactttcaggctgcgcgccacggcgctcggcgagtagtgcagctctttgatcgcggcccacacggccgctttggtctcttcggcgacgaaacgagtcttattgatgacgtgcgaaacggtggtggtggaaacgcccgcgcgtttggccacatctttaatcgttgccatgtaaggaatgactcctgaactcacatgtttacagcatgtaagtgtgatgttaatcgtttgcctacgtagatccttctccagagaagcgaaaactgagtttttagtgtgttgaagtcttcagcgcttaatcaggaggggcatggatgccggtacgcagttgtgaactgcgaattttgtcgcatattgaacaaaagtggaagaggtaatcgagattataaaccgggaaatgataacaagattttatcggcgaactgtgggaaaatgatttgacgtactaattgtgcgccttttatccttaggaaagcccattttaaaggagttgtcatggataccgatctgaagatgtctctgttcactaccgtcggcgcgttggcgatgatcatcgctttcagctttgtcgccgcgttgaactgatctcccgccggttttaaaaaaggcgcagcctggctgcgcctcgtcacttcggcaaggcctgcgtttacgccaggttttccgccgcaaatttccagttgaccaacgcccagaagttttccaggtattttggacgcgcattgcggtaatcgatgtaatacgcgtgttcccacacgtcaacggtcagcagcggtttatcttcaccggtcagcggagttgccgcgttggaggtgttgacgatcgccagcgcaccgcccggttttttcaccagccaggtccagccggcgccgaagtttttcacggcggcatcggtgaactgctctttgaacgcagcgaaagagccgaaggatttgacgatcgccgccgccagttcgccctgcggttcaccgccgccctgtggcgacaggcagtgccagtagaaggtgtggttccacacctgcgcggcgttgttgaacacgccgccgttggaggtcttgatgatctcttcgagcgatttgccctcgaactcgctgcctttcaccaggttgttcaggttaaccacgtaggtattgtggtgtttgccgtagtggtattccagggtctcggcggagatgtgcggctcgagcgcgtttttctcatacggtaatgcaggtaattcaaacgacattgcttcctcctttacagcgccactttcttcccgcccaggcgggagccagatgggccgttttttattgtggtcattcaatcttaacaattttcatcataaaaaacaggaggaaaagcgagaaatgcgcgtgggggagtgcgatgggcgatagcttgagcaggcggttgcgaccggggccgcaaccgcgcagaacagggaattaacggatggttttcggcgtcactacgcggcgtgcgccgatgtaatggttttgccaatagtcgttgtcgagctggctgatgcggatctcttcgccggtgcgcggcgactggatgaatttgccgttgccgagatagacgccgacatggtccgccacgccgcggttgttgatgcggaagaacaccaaatcgccgctttccagttcgcttttcttgatcggcgccgcgtcgcgcaggtgatacatttcgttggcggtgcgcggcatcttgattttcaccacgtccttataggcgtaatagataaggccgctgcagtcgaagccggtgcgcggcgagctgccgccccagcggtaaggcttgcccatctgatccatcagcttggccatcgcggtctgtttggcatgctggtaacgttttttgtgcgccgggctgagttttaacggcttttcttcacgcgccagtttggcggtggccataccggcgtcgcggtggcggccatagccttttttatagccctttttcggcggggtgactttaatcttggcggttttctgcgctttggccttgggtttggcgctgacgatctttttcgcgcttttctcgcttttggccttggcggtcttggtttttttctcgggggccgtcactttggcttttttggcggctttatccgctttcttttttctgcggtcatcgggccgcgcttcattagcatggcttttacgctgctcggcggcaacgcgcgcctgtggcgcagcgtgcgccaaattgaagaagagctgcgtaaacagcagcgcaaagagcgtaagaattaaacgcatgtcgacgtcaccaaccttggccccgaaacggatatcgaaagagttacagtattcccgaacttcaccatataaaacagcgaagaactcataaataataatccatattgtgagaaaacgttaatgacattttttttggtttaaaatcagcctgttgatgtataaaaaagcgccaggcgacggtggcggatataattaagccgcgccggcatcgcggcgcaatatattagtgaaatggtcggattaaaaatgttattctcaacgtatgttttgaccggaatgacgtggccggtgaaacgcgatcggcggcgggcgaatatccttgcaaaagatggcgttttcttgcgactgttccagccgctacaatagcccgcgtgatgcatgttgtagccatgaaatgtggcttgaggaagcaataaatgacgacgacacttgaaaaaattcagcaccagatcgctgaaaacccgattctgctttacatgaaaggttcgccaaagctgccgagctgcggcttttccgcgcaggctgtgcaagcgctgtccgcctgcggcgagcgtttcgcctatgtggacattttgcagaacccggatatccgcgccgagctgccaaaatacgccaactggccgacgttcccgcagctgtgggtagatggtgagctggtcggcggttgcgatatcatcatcgaaatgtatcagcgcggcgaactgcagcaactgatcaaagaaacggcagaaaagtataaagcgcaggaagaccagcagtcttaatcgacgggcttgcgattatcgcgtaacgggcggcgccagtgtaactgggccgccttttttgttggttttattcggcgagatcgccggcgggcagcggccagccgccgagacgtttccagcggttaaccagctcgcaaaacagcagggcggtttgctcggtgtcgtacagcgcggagtgtgcctggctgctgtcgaacggcatgccggcggcgatgcaggctttggccagcaccgtttgccccagcaccaggccgctcagcgcggcggtgtcgaaggtggcgaacggatggaacgggttgcgcttcaggccggcgcgttcggccgcggccatcaaaaagctgtgatcgaagttggcgttgtgcgccacgataatggcgcgattgcaaccgcgatccttgagccctttgcgcaccgctttgaaaatggcgtgcagcgcgtcatattcgctgaccgcgccgcgcagcggattgtgcggatcgatgccgttaaacgccagcgcttccggctgcaggttggcgccctcgaaaggctccacgtggaagtgcagggtttcgtcccgctgcagccagccgtcctcatccattttcagcgtgacggcggcgatctccagcaacgcatcggtattggcgttgaagccggcggtttcaacatctattactacgggataaaacccacgaaaacgaccactcagggcgttaagatcacttttctcggccatcagtttcttatcttcatcgaatgcagcgcgcattatggcaaattttgcgcccggttgcaggcgctatcgcgcggagaatcagcagggcgccaacgcgccctgaaggggaggcttagtggccgaggccctgaccggcgtgtttgttttcgatcagctcgattttgtagccgtccggatcttcgacgaaggcgataaccgtggtaccgcctttcaccgggccggcttcgcgggtgactttgccgccggcgcgacggatgctgtcgcaggtggcggcaatgtcatccacgcccagcgccaggtggccgaaggcggtgcccatatcgtagctgtcggtgccccagttataggtcagttcgataactgcgccttcgctctcttccgtatagccgacgaaagccagggagtatttgtactccgggttttcgctggtgcgcagcaggcgcatgcctaataccttggtgtagaagtcgatggcgcgttgcaggtcaccgacgcggatcatggtatggagtaagcgcataattcctctgaattgactgtgccgtggcagacggcgggtggattgaagcacaagcgagtatagccttgtcccgcaagggaattcaacgtgacgaactggtgacaatgtcactttgtggtctcgcgtcgagggtgtctaaatattgatcgagtgtaccgatcgatacagagtaattgatctgcacaatcaattatctattccagcggcgatcgtgtaaaaatcgaacggcaataaagatcaacaccagggaacagcggcccgcctcgtgcgggcctttttgctttgcgcgcgacgcataaaaaacggccatgcgattgcgtggccgttggggtcaggacagattacttcgccagaaacggatagtcggtatagccttcggcgccgccgccgtagaaggtttccggcttaggttcgttcagcggggcgtgctggcggaaacgctctaccagatccgggttggcgatgtagctgcggccgaaggccaccgcgtcgatgaaacctttttcgatcaatgcttcggctttttcggcggtgtaggcgccggcaccgacgatcacccctttaaagtgggcgcgcaccgagtcgcggaaggcgtcggaatacggtttgccgccggcccagtcaggttcggagatgtgcaggtaagcgatattgcgcttattcagctcttccaccagatacagcactgcttcttcctgatcttcgccgttgtccagcccgttgaacggccccagcggcgagatacggataccgatgtgttcggcaccccattcggcgatggtggcgtcgaccacttccagcgtcaggcgggtgcgattctcaatgctgccaccgtattgatcggtacgttggttggaagccggtgacatgaactggtgcagcagatagccgtgggcagcatgcagttcgatgaagtcgaaaccggcttcgcgcgcgttggcggttgcttggcggaaatcgttgatgatgcccgggatctcgctggtttccagcgcgcgcggcgtggaggtcggcacgcgcacccaggcgccggtttcatcacgcacggtggtgcgggtttcggcgttgatggccgaaggtgcgaccggcgcttgcccgcctggctgcaggctggcgtgggaaatgcggcctacgtgccacagctgcacggcgatgtggccgttgttgtcatgcactgcctgcgtgatgtttttccatgcggcgatctgctccggcgtatgcaaaccgggcgcgccggcgtagcctttcgcctggaaggaaacctgggtcgcttcggtcacgatcaggccggcgctggcgcgctgtgcgtaatattccgccatcagcggcgtaggaatatcgcccggctcgatgctgcgcaaacgcgtcagcggagccataaacacgcggttgggcagggtgatggcgccaaccttcagcggagagagcaatttttcagtcttcatagtgcatcctgtatttaatagaccggtcgtctagtaatgggcgataaaaaaccatgaactgcattttttcaataaaaataagttgttaccgttacggttgcggcgggcgcagcagcaactcgatgctttccagcgcgctggtcaacggcgccagcgagtgacggattttggcgcgcagcggggcgccgagccacagtgaatacagcgtttctgcggttgccgccgggctcatggctaccgacagcgagccctcggcgataccgcgctcgatggcctcctgaaggtggccgatcacgcgagcggtgcccgtttccagcgcatggcgcatcggttctgacagatcgctcacctcggcggaaagcttcaccgccaggcaggcgttgtggcattcgctgcggcagtggtagctgatagcctgggcgtaatagccgagcagctggtggcgggcatcaccgcgtctgtcggcaaacagcgcctgcatttctgcatcataatgcgcgaaatagcgctgcagcatcgcttcgccgaaggcttccttcgagcgaaaatagtggtagaacgagcctttcggcacgcccgcggtggccagcagttcgctcagccccatgccggtaaagcccaggcgcaggctgagggtttcgccggtggcgagcagatgttcacgtgtatccacgttgcaatgcgttgatttggtcatcatggtgccgagcataatagaccgattggtctaggtcaatgggaataaaaaaaccggcgcacaaaacgccggttgtctgcaaactattgtgccccagcggcacgcggaagttaagcgctacgccgcgttgcggcagcgttgcaggatatccaactgggattgatattcgcgggtttgtacgttcagcatgcccaacagggtgtggaacaggttgtcctgcgaaacctcgtccttttccgccagcgtattcagacactggcgatcgatgccgaaattgcgctgatagtcggccgacatccacatcaggaaaggcacgtgcgtttgctggctcggtgcgaagacataaggcgtgccgtgcagatacatgccgttttcccccagcgattcgccatgatcggacaaatagaccagcgcggtattgaaacggtcgtcatactgccgcagcagcttgatggtggcatcgagcatcgcgtcggtatacaggattgagttgtcgtaggtgtttaccaattgttcatggctgcaatcctggatctgattgctgttgcaggtcggcgaaaacgtctggaattctggcgtgctgcggcggtagtaagccgggccgtggctgcccatctggtgcagcacgatcacgccgtcgtctttcaggctattgatgtagtcgttcagcttgtacaacagcacgttgtccatgcaaacctcgccgtcgcagtcctgctgcggtttcagcttggtcatgtcgatgtgcggcacccggtcgcaggcgcctttgcagccgccgtcgttatcgcgccacagcacattgacaccggcatgtgccagcacgtcgagcatgccttcctggtgcgtcgcctgagtcgcgtcgtactccttgcgtggcatgttggagaacatgcagggcacggagatcgccgtttcggtgccgcaggagctggcgtttttgaagtagaccacgtcgtcctgcttcaggcgcgggttggtttcgcgttcatagccgcctagggagaagttttcggcgcgggcggtttctcccacgaccaggatcaccagcgttttcttggcctgcctggcgatcagcggccctttacgcgcatcttcgccgatcttgaccagcggcagattgcgggtgaagtaacgctgttcggtaaacttgatggtgccggccacgaagttggaaggcgtcaacatcttcaccacgcttttattgttgcggatcagcgaagcgtagtctttgtagaacagcgcggcgacgatcaggatcaccaccaacgagagcatgacgttggcggcgcgcagtccgaccatgtaccaccaggggcgagtctggcgaatttgggtgaagcagaccgccaccgccggcagaatgccgagcagcgtcagccacaatcccatgcgcggcgtcagcagcgcggtcgcctcctgagggttggtttcgaaggcgttttgcatcatgttgccgtcgatcaccacaccatagctgtacatgaaatagttggctgcggcgctgccgagcaagaaaaagatgatcagcggcttgcgcaggtagggcacggtcaacacgctgaagatgatattcaacgcacagaagatcaccaccggcatgctggcggcgaaaatcacgctgtgggcgctatcgaaggtgatatacgaccaggcgcgctgcaggaataaggcgttctgaaataaagtgaagaacagggcggcggcgagggtaaaaccgaggctgttgcaccgtaagcgttgacgtaaccacattgccaaatcgggatcctgaaagtagataatgccttgaaatctaccggatgaaacttaagaaaaccttagaaactcagattactggcggcggagaatacgcggaaaacgccaggccgagcggcctggcggcggggcggtttagtaggcggcggtgaattgcgcacgaataaactgaggcttttcaatctcatcaacgatagcgaccgccaggtcttccaccgaaatgctggccggcgcttcgccgttcatcagcagttgcgtggtgccgaggcggaactggccggtgcgtttgcccggctccagcagggcggccggcgaaagataggtccagtcgagtgccgactcgttacgcagtttgttgcgcagatcgcgcaccgcctgcgcgccggggcggatattttccgggaactgcggcgtatccaccagttcaacgcccggcgccacttccaggctgccggctccgccgaccaccaacaggcgtttgacgccggcctgctcgaccgcggtgaggatctgctgggcgccgcgggtggttttctcatacaggttgtcttcgccccagccggggttgtaggcgctgatcaccgcatcctgaccgcgcaattgtcccgccagccaagccgtatcggcgatgtcgcccagtgcgacggtcagattggcgtgctccggcaactcttttttctggcgcgcgattgccgtcacctgaataccgcgagccagcgcttcatccaccacgcggcggccaacaaaaccggttgctccaataatggctactttcatctgtatgctccttcggggataggttcagtatcgtgaggcagaccgaggtgcctgccgcgtggtttctactctagtccttaacaatagccgtgattagtgccatattcatgctttcttgattaagtaaaacttcataatcgtggataaactcaatcgaatggcggtattcgccaccgtggtggcggagggctcgctggccggtgcggcacggcgactgggcatgacgccgtcggcggtcagccagcacatgcgctcgctggagaaggcgcttggggtgccgttgctgcatcgttccacccgccgtctggcgctgaccgaggcaggagcggcgttctatcccggctgcgaggcgatgctgcaacaggcgctgcaggcggagcagcggttggcggagctgcgggatacgctggtgggggagctgcgcatcgccaccccggtcggcatcggcggccgatcgcttgcggaggcgttgtcgccgctgttgcaggcgcatcctaagctgacgctgcgagtgctggcggacgatcgcatcgtcgatatgatagaacagcgggtcgacattgcgctgcgggccaaccggcagctggcggacgccaatatgattgcgcatccgttgacggcgtggccgatggtgctgtgcgccgcaccgcgttacctcagccagcatggggtgccggaaaaaccgcaggatttggtacagcaccgctggatctccagcggctacagcggggcgcatctggatttgcagcaccagtccggccagcaggtcaagctgcggctggcggaaggacagatcgtcagcgagagcatgaacgtgatgcgcgcctttacccgcgccggtctgggcatttccgttcagccgctgtatgaaattggcgacgaactgcagcgcggcgagctgttgctgctgttgccggagtggcggccggcgccgctgcggctgcacgcgctgacgctggaacgcactatgccggagaaaagccgccaggcgctgcgctatttgcgtgactattttcgccgcaaaggagaaaagggacttgccagcggcggcgatggcgtcttcaattagcaagagaacgcaggaggagccccgtggcgcagcagcttgagtttttcgacatccccagcccgtgtcgcggcatttgtcaggccgacgatcgtgggttctgccgtggctgcctgcgcagccgcgaggagcgtttcggctggatgaacatgagcgatgcgcaaaagcgcgaggtgttgcgcctgtgccgtcaacgcttcctgcggctgcagcgcgccaataaagcgcctgacgagccgctgccggagcagccgtcgttgttttgacctttcctgatctgccgcacgttcgtgtggcttaccgcttccctgtgcctcaccggcttgtgtatgctggctgacaactaatgtcatgaggttttcgcaatggtagaacgtattcgtctcgcgccgcaggggcctgaattttcccgcatgatttgcggttactggcggttgatggagtggggcatgtcaccgcagcagctgctgacgttcatcgaacagcatgtcgaactgggcgtcaccaccgccgatcacgccgatatctacggtggctatgcctgcgaacaggcgttcggcgacgcgctgcgtctgaagccggcgctacgccagtcgctggaattggtgaccaagtgcggtatcgccaccaccgccaagcccggtaacccgattgggcattacatcaccgaccgcgatcatatcgtgcagagtgcggaacagtcactgcgccatctgcataccgattacctcgatctgctgctgatccaccgcccggatccgttgatggacgctgacgacgtagccgaagccttcgttgcgttgcacaaaagcggcaaggtgcgccatttcggcgtatccaactttacgcccgcgcagttccaactgttgcagtcgcgtctgccgttcacgctggcgaccaaccaggtggagatctcgccgattcaccaaccggccattctcgacggcacgctcgaccagtgccagcaactgcgcatcaagccgatggcctggtcctgcctgggcggcgggcgcctgttcaacgacgccgagtttcagccgctgcgcgacgagttgcagcgggtggcgcaagagatcggcgcggagaccatcgagcaggtggtgtacgcctgggtgatgcgcctgccgtcgtcgccgttgccaatcatcggctccggcaagattgagcgggtgcgttcggcgctgaaggcgcagaaactggtgctgagccgccagcagtggttccgcattcgcaaggcggcgctggggtatgacgtgccttaaggcgggcagaaagaggaaagccgggcggcgaaagcgcccggctttttttatgccgatctttaggccaacaccacctgatcggtgctgatgtgatcgagcgagacgccgatcagcgtgacctggctgtggccgaaggccagcaccagatcgtcgttttgctgcgtggcgtagtcgcggatattgccgctggcgccttcggtgccgataaataccagtttatcgctggcgttgaagccatacagctggtcgcggccgaaatcgccgctgaacaggaaggtgttgccgttgccgacgcccttcaggatgtcatcgccgctgccgccgacgaaggtcaggttgccgccggcgtggccgatcagcgtgtcgttgccggcgttgccgaacagccaggcgtcgtggctgcgagcctgcagcacgtcatcgccgtcgccgccggtggcggcggcggcataggctttgaggcctgagtccgatttcaatccggcggcggttacctgatgatccacttctttgttgaagataagccaggaggtttctttgctgcgcagggtgctgatgtcgtccgccagcgtaatgccgcccttggcgtcgcgcaggtaaagcgtgttgccgtcgtaggcgacctcggtattcttcaacgcctgctgggtatcgaagatattgtggcctttgccgccggcgatcaggttatagccgccggcgtcgcggaagatatcgtcgccgtcgcggccctcgagataatcgttgcctttgccgcccttgatcaaatcattgccgtcgctgccgatgataaacgtcggcccgctgtgcgtttccgcgttgcggttcaggtcttccacccaggtactgccgcgcgtcacgttcgacaggttggagacgatgatggtcgagtctttgtcggtcagcgaataaaactcggagttcagcacccgcatcaggccatcctgatagaagaacggcaggtgggatagccaggtcggaatgttgagaatggagaacggcaacagattccaggcgtccgacgcgtagtggtcgttgaagttgacgatattgttggtggcggaggtatgcggcgcatcgtgaacgcccaatgacggcagggtcagcgaggtgccgtcgagcgcgcgaaacaccggatcgttctcataaccgatgttgatcaccttgccgccggcttcgtactgggtcggcgaggcgaaggcgacatagttggactgcgcgtagaagccgccccagttggcgtcgctctgcgccgccatgctgttgaccgccagcccgccgaggctgtggccgctgaccaccacgtcctcgccgctcagcccgtgggcctgcgcgaatttcgccacgtcgcccagcaagttgccgaacgccttcagcgtatagccgtcggcgtaacctttcggcccgaacccggccagcagatcgttaatcacatcgccgatggtatcgccgatcaacgactcgcgcgggccgctggtgccgcgaaatgagatgccaatggcggtgagattgccttcgctgtcatatttgcccagcacctcggcctgcgcggtggtgtaaccggcggtctcgccgtagtaggtgccgcgtgcatcggttttgccggcgtaacccaactgcgtggcatcgatcaccgaccagccggcattatttaccgcttcctgcgcggcctgttcggagtcggggttccagggcaggccgggcaggccgccctgcgactgggtgctgccgatgagcgccgtgatcagcgtcagcggcagaccgggcccgaaaccggtctggtgatagccttcatcgaagccgttatcgatattgtggtaagcgtaggtagagatggccaaggcgtcggaaaacagcgcctttgacgcgttttcgtccagatccttatagctaaagatgcccatatcagttccttatgaagtatgccgcctggccgggaagtgaactctcgcgcgtcggcggtggaaacagggaaacaacgttagccgaacgacagctggtcagaggaccaacatcggtagaattattattggtgctaaatattaggcccgcgaatcaaattggcgagattgtgcgttggttaacagtgctggcgttggctctcctatactgataactcgatatagtcattaaggagactgattgatgaaacgttattggtatgcggcgcttggcctgatggcctgcggggccgctcaggcggcgacggtcgacgttgagatgaatttggtgaccgggcagggtatcggtcaggatatcggcaaagtggccatcagcgaaacgccttacggcttactgttcacgccgagcctgaaagccttgccggccggggtgcacggtttccatgtgcatgagaaaggcagctgcgagccgggcatgaaggacggcaaggcggtggcggcgctggcggctggcgggcattttgatccgcaaaaaaccgggaaacacctcggaccctatgccgacgggcatctgggcgatttgccggccatctatgtgaccgccgacggcatggcgaacgatccggtgttggcgccgcggctgaaaaaaatcagcgaaattgagggcaaggcgctgatggtgcacgccggcggcgataaccactcggatcatccacagccgctcggcggcggcggtgcgcgcttcgcctgcggcgtgatcaagtgatcacccgccgctaacggccggtgtggcggcgggctggcccatcgcctgttgcaactgctgcagcgagcagtagagccgccaaatcaggccagccagatcgcgcgccgcctgttccgggtggtgcgccagcgcgttgctcatgcgcagcaattcctgcagcgtggcgtccagcgaactgtgctgcacgcctttctccgtcatgatgccgcgcaggcagtggatacagacgttgcgcaccgccgacagcggatctgatcgggtttgccagtcgcgcagttgccagacgatatggctgcagttgagcagcaccacgccccagcgcagtaaccaggtgcgcgcctcctgatcctgactttgattgagctggctgatgcgatggtagatcagcgattcaaactggctttcgctctgctgcggccgtttgctcaactgatcgataaagtcgcgccgcagcgcgcggataatgcggcggcttttgcgtttgtccgagctggggcgcaggatctgaaacgccagcccggccagcagcacgccgacgactttagcgatgttgtcattgataaaggactggtagtcatagctcggcggattgctgacggtcagaaacgagcccataaagacgatcagctgcccccaaagcgcggcataaggcgggttctgcagcttgagcatctgcatggtcaccaggatcgggaacaggaaggcgcagaacacccagaaatcgtcaatctggatcatcaaaccgaatttcaccacgaagcaggcgaccgagagcagcagcaccgccttgagcaaggtgctgacgctgttgatcggcgaaggcgtggaggagtagagcacgcagctgatggcggtgagcgtcagcgccgcgctgccggcgtcccattgcgtgttgatccagtaggcgcagccgatcacgatgcacaaaaaggtgcgcaggccattgtaggcggcttcatagctgtcggtatggcgcgccagcgaagtggcgcgcggcggttggagatcgctgaccgccgtggcgctttccaaccgccgcagccagcggctgcagcgcaggtaaagccaacagaaatcgcgcaaccgcagccagaaggcgcgatggcgatagtccgcgggatcgtgcggcgcgatctgctggagcaggcgcgccaagcgatatttatcggtggcgggatcgcgcagctcgtccagcagttgcgtcagcaccggcatcagattgacggggcgatccggccagttcagcagcatgcggcgcaggctggagatgacgctggtaatgcgcagctgctggtgcagcagatagttgagcaggttattttgccgccgcagccggtagtggctccagaatgcctgaatgcgcagcaggttcatggtcaggatctggccgatgaccccttcgtgcgaggtgcgcatctgcgcggtgacctccggctgccacagcatggcggcgtgctccagcaggcgcagttgcatgcgccgcagcgaggtcatcagggcttcgccgtcggaggtgctgggcaggatcatcatcatcaacccgccgcacagaatgccggtgatcacttcgcaaactcgcgcctgggcgatgtcgaagatctgctgggtatcggtgacgttgaccgtgccgaaggcgatgatggcggcggtatagcccgccagcgcgaaggcataagagacgttgttttggtaatggttggagacgtaggtgcacaacccgatccagacggcgatgaacagcgtaaacagccagggatcgttcaggcagtggccggcgatcgccaccgaggcggcggcgcccaccaggctgccgaagatgcggccgatgcttttgctgatcacgccgccgatggtggggaagctcaccaccgcggcggaggtaagcgcccaatagggttcgtcgagttcgagcacgaacgcgacccacagcgccagacacatcgccagcgagttgcgcagcgcatagcgccattggccgccggtcgccttaccccagggggtacggctccactccagaaagggcaggttcacactttagttccgctgatgaatcgaaatggtgcaggtggtgccggcaaccagcgtcaaatcggcgggcacgttgagcaattttatccgcaccggcacgcgctgagccaaacgcacccagggaacattgggcttaacatccattaatagatcgttgttgctgtcaacgctctgatcgtaaatggcgcggccgatactctctacttctccctgcagcggggtgttgccgttatataagacaatatcggctttattgccttcttttatatgtttcagcttggtttcttcgaaataaccgagtacataaaacgaatggacatccaccaacgcgaccaaaggcgtgccggcgttggcgtagttcccgacccgcgcctgcagattggtgatataaccgtcggtcggcgcgtaaattttagttttgctcaaattccatttggcctgttccaggttggccagggcggctttataggcggccttcattgcctgagcggctaaattggactcgtccaaatcttcagcggaaataacgttgcgcggcaacccgcggcgtcgggcggcttcgtggtctgccttggccagatccgattgcgcttttgccaccgcggcctcggcattgtccagcgcgatctggtagggcaccgggtcgagggtaaaaatcagacttcccgcaggtacgaactgattgtcattcgcgcttattttctctaatcttccagagacttcaggggtgatattgacgagttcggcgcgcacttttccatcacgggtccatggggattgcatataataattccagagccaccaaccggcgcagacggcaatggcgcagacgatcaccgtagagaagtattttaatgttttatgctgcatgggttaccaactcgctaaaatccataaggaaccgctgacggtcagaacgaaaatggacaggtccatcaacatgggatgccagatttcaccggaatacatccagtctctcagcagttgatgaatcagcagccataagaccagtcctagtaaaaaagctttaaatataggtggaaaataaagcgatgcccccaggaccaaatcgggtaagggggatgaggtgtgtaaccatgatgtattcacattaacaatccctaagggtgaatatgttgaatatttgcataacgattaaacgataacggccgaaaatagtggctatttccacaatatacattatatacatttgtgtttttaatgtgagttacccaaaatagtctaaactctgggaggtaatgttagcatgctaattataaggagggggaagtggagtcaacattaggttcagatttagcacgattagttcgtgtttggcgcgcgctcatcgatcatcggctcaagccgttggagctgacccaaacgcactgggtcactttgcacaatatcaatcgtttgccgccggagcagtcgcaaatccagttggccaaggcgatcggtatcgagcaaccgtcactggttcgcacgctggaccaattggaggagaaggggctgatcacgcgtcacacctgtgccaacgatcgccgcgcgaagcgcatcaagctgaccgaagcggccgatccgatcatcagggaagtggacagtgtgatcacgtctacacgcagtgagattttaagcggcattaccgccgacgaagtgcatctgttggtagggctgattggcaagttagaacaaaatatcaccgaactgcagaacaaataataatattcttatttttctacgattacagtttcacagcatcagaaataaaaccggaggcgattgcctccggtttgccgtgtgccgccagctgacttacagcggagagacggtgatggtgtcgcccatgcgcgccatgcgcacgcgctgacccgggctgaacttggtgtcgcctgctttctgcaccaccacgatgttctctttctggtcggttttgatttccagctcgtagcctgaggtacgaccggccacttcaccgatgctgttgcccgccgcgccgccggcgatagcgcccgccgcggtagccaacgtacggccggtgccgccgccaacggtgttgcccaacaacccaccaattaccgcgccgccgatcatccccaaggcgttggagccttcgccgccctgaattttaaccggacgcacggaaaccagcgtcccgtaagtgacgttctgcacctgcttggcctgcgaggacgagtagacatcgccggacatggattcattggcacacccagccaacgtaacggcggcgacggcaacgacgagaagacgcttgatcatataaaactcctgatggtagtagtccataacctggcaatgctcaccaggcaagattcagtgaaaatgatagacaaagtatggctgaaagttgatacagcgccatgcctcatcgctgcacgcagcttaacttttctctgttcaaccaataataaaccgcggtttacctttatgacagcctcaccgacattccgttgccggttaacgcacggtttaacacataaaatgtgccacagagacgcatctggctcacggcgcgtaaaaaaagcatcataattcatggcgttaattcgtcaattctggtttatttgtcaggataaaatttgcttaccgtgcgggttagaggatgttgctatgaagtcaggccgctatataggcgtcatgtccggcaccagtctggacggaatcgatgtggtattggccgcgattgacgatcgcatggtggcgcagcaggccagctatagccatccgatgccgatggcgttgaaaaaagagatcctggggatgtgccaggggcagcaaactacgttggccgccgtcggccggctggatgcgcagttgggtacgctgttcggcgaggcggtgctcggcctgctgaagcaaaccggcatcgacgcggagcaggtcaccgccatcggttgccacggccagacggtgtggcacgagccggaaggcgacgcgcgtttctcgatgcagctcggcgataacaaccgcatcgccgcgctgaccaatatcaccaccgtcggcgatttccgccggcgcgacatggcgtacggcgggcagggcgccccgctggtgccggcgtttcatcaggcgctgctggggcatcccgtcgagcggcgcatggtgctaaacgtcggcggcatcgccaacctctctctgctgttgcccggtacggcggtgcgcggtttcgataccgggccgggcaacatgctgatggacgcctgggtgtggcgccaccgcgcgcagccttacgatcaggacggcggctgggcgatgcaggggcgagtctgcttgccgttgttgcagcagatgctggcggatccgtacttcgcgcaaccggcgccgaaaagcaccggccgcgagtatttcaatatcgcttggctggagcggcagctggccggactaccggcgattgcgccggtcgacgtgcaggccacgctgacggagctgaccgccgtcagcattagcgaacaggtgcagctggccggcgggtgcgagcgtctgttggtgtgcggcggcggggcacgcaacacgctgctgatggcgcgtttgtcggcgctgctgccgggcactgaggtcgggctgaccgacgatttcggcgtcagcggtgacgacatggaggcgttggcctttgcctggctggccttccgtacgctgtccggccaggccggcaacctgccttcggtaaccggcgccagccgtgaaacggtgctgggtgggatttatccggttttgccattggggggccgttagctctgttaggatagcctgtgaaggatttttctaaggagcaacagcatgaaaaaagtcattttcgtcgccggcgcgctggcgctgtccggctgcagctacatcctgccgcagagcagccagacgatgcactaccagtgcggcactacgccgctgacggtggcgctcgacggcaaggcgagcgaagtcagcctgctgatggatggcgagcagctgcatctcaagcaggtgctggcgctgaccggcgccaaatacagcgacggcaaatacactttttggtcgaaagaccgtaacgcctatcttgagcgcaacggcaaggtagtcatgagcgactgcgtgttgacggagtgagggttgacggcggcgtcggagcgattgagttcctgacgccgcaggcgcagaatgtaacgacggattttttcagttggtcgataacccagatgattgaaaagaatgagtttgatgttgcggacctgcgccgtgaatacacccggggcggcctgcgccgcaacgatctgaccgccagcccgctcgaactgttcgagcgttggttgaaacaggcctgcgacgcgcgccttgcggatcccaccgccatgtgcgtcgccaccgtcgacgaacacggccagccttatcaacgcatcgtgctgctgaagcatttcgatgagcaggggctggtgttctacaccaacctcggcagccgcaaggcgcaacagctggcgcacaacccgcatatcagcctgctgttcccctggcacatgctcgatcgccaggtgattttcctcggccaggcggagcgtctgtcgacgctcgacgtgctgaagtatttcaacagccggccgaaggacagccagatcggcgcctgggtctcgcagcaatcgtcgcgcatttccgcgcgcggcgtgctggaaagcaaattcctcgagctgaagcagaagttccagcagggcgaggtgccgttgccgagtttctggggcggattccgcgtgaaattcgactccgtcgagttctggcagggtggcgcccatcgcctgcatgaccgtttcctgtatcagcgggacgggaatgactggaaaattgaccgactggcaccctgaaggcggaaaatcctctctaagcgctggtgctgatgccgccggcgctttattctatgcgctaccctgaatttttatttcgccactgggcgaaaggccgtgtaccggcaaaggtgcattcgtttatacatggagtcattgatggcaagcagcaacttgattaaacaactgcaagagcggggcctcgttgcccaggttacggatgaggaagcgttagcggagcgactggcgcaagggccaattgcactgtattgcggtttcgatccgaccgctgacagcttgcatttgggccatctggttcctctgttgtgcctgaagcgcttccagctggccggccacaagccggtagcgttggtgggcggcgccaccggcctcatcggcgatccgagcttcaaagcggcggagcgcaagctgaacaccaccgatacggtgaacgagtgggtcgagaagatccgcaaacaggtttccccgttcctcgatttcgactgcggcagcaacagcgctatcgcggccaacaactacgactggttcggcggcatgaacgtgctgaccttcctgcgtgatatcggcaagcacttctccgtcaaccagatgattaacaaggaagcggttaagcagcgcctgaatcgcgacgactccggcatctccttcaccgagttctcctacaacctgctgcagggcttcgatttctccgaactgtacaaccgccaccaggtggagctgcagatcggcggttccgatcagtggggcaacatcacctcgggtatcgatctgacgcgtcgtcagcatcagaagcaggtgttcggcctgaccgtgccgttgatcaccaaggcagacggcaccaagttcggtaaaaccgaaggcggcgcggtctggctggcgccggaaaaaaccagcccgtacaagttctaccagttctggatcaacaccgcagatgccgacgtttaccgcttcctgaagttcttcaccttcatgagcctggaagacatcaacgcgctggaagaagaagacaagaacagcggcaaggcgccgcgcgcccagtacgtgctggcggaagaagtgaccggcatggtgcacggtgcggaaggcctggcggccgccaagcgcatcacccagagtctgttctccggtgcgctgcacgacatgaccgaagcggacttcgcccagctggcgcaggacggcatgccgaccatcaaactggaccgcgacgccgatctgcagcaggcgctggtgaatgccgagctggtgccgtcacgcggccaggcgcgcaccatgatcggctccaacgcggtgaccatcaacggcgagaaacaatcggatgccgaataccgtttcagcgacgcggaccgtctgttcggccgctacacgctgctgcgccgcggtaagaaacactactgcctggtggattggcagtaagcgaataataacggtaaggggccctggcggcccctttatttttgcgcagccgcccggctgccgtattccgaacgagttctgtcgatgaaaaacattctttctatccagtcgcacgtggtgtttggtcacgccggcaacagtgcggctgaatttccgatgcgccgcatgggcgtcaacgtctggccgctgaacacggtacagttctccaaccatacgcaatacggccagtggaccggctgcgtcatgccggccaatcacctgaccgagatcgcgcagggcatcgccaatatcgatcaactgaagcgctgtgatgcggtgttgagtggctatatcggttcgccggagcagggcgaccatattctggcgatcgtgcgccaggttaagcaggcgaacccgaatgcctggtatttctgcgatccggtgatgggacatccggaaaaaggctgcatcgtggcgccgggcgtggccgagtttcactgccgccaggcgttgccgtgcagcgacatgatggcgccgaacctgctggagttggagatgctgagccagatggccgtcaccaacgtggccgatgcggtgcaggccgcccgcgcactgatcgccaaagggccgcggctggtgctggtcaagcatctggcccgggccggctatcacgccgactgttttgaaatgctgctggtgacggcggaggaggcctggcacatcagccggccgctggtggacttcggctcgcgtcaaccggtcggcgtcggcgatttgaccagtggtctgctgctggtggatctgctgaagggcgaggcgctggataaagcgctggagcacgtgaccgccgccgtgtatgaggtgatgctgaccacgcaggcgatgggcgagtacgaactgcaggtagtggcggcgcaggatcggatcgtgcaaccgcgcagcgagttcaaagcggtaaaactgtaagtgcaacgggccccggcgatagccaccggggccgaatgtttacttcaatccttcggcgttcagcgccgcatccaccgccgggcgcgccgcaacgcgatcgaaccaggccgccagatgggcgtgtttgcgcacgtcgaactgcagggcgaacgcccaacgcaacacggtgaacagataggcgtcggccacgctgaaacggtttcccaacaggaagtgctgcttcgccagcaccgaatccagatagctgaactgttgctccagcctggcgcgcgcgatggttttgtattcctcgggcgttttcgggttgaacagcgggctgaatcctttgtgcagctcggtggcaatgtagttcagccattcgatcgcgtggtagcgcgacagggtgcccgccgccgggattaggttgcgatccggcacacggtccgccagatattgcacgatcgccacgccttcggtcagcaggctgccgtcatccagcagcagcgccgggacctgtcccttggggttgatggcgaggtaatcggcgccgctctcggttttcttctgcgccagatcgaccttctccgccgtaaaatccagccctgcctcacgcagcacgatatgcggggacagcgaacaggcgccggctttatagaacagtttcatcggaagctccttgttgatgacgaatgacgggcatgcttaacctctcatcgtagtcccatagcaccaaaattacagcggcttagctaacaaatttaaccgacgatcgcctcggcgggctgcagctgcgccagcgtcgcggcgatctgctgctgcagcgccggcggcgccacctgcatcggcgaacgcaactcgttggcgatcagcccctgctgggccagcaccgtcttgaccggcgccggattcgggaagctgaacatctggtggatcatcggcagcagctcatagaagttgctgcgcgccgcagccagatcgccggcggcgacctgctgcaccaactggacgaaacgttccgggtgaacatgcgcggcggcggagatggcgccggtgccaccgaggcacagcgtggtgaggatcagattgtcttccccggtcatcacatcgatttcgccatcggcgatcagcgccatggtggtgtcagggttgccgccgcagtccttgatggcggtgatgcgcggatggcgtgcgagccggcgcagcgtggccagctccatggcgatgccggtgcgctgcggaatgttgtacaggatcaccggcacggtggaggcgtcggccaactgggtaaaatagtcgatcaggccgcattgcgaagggcggatgtagtaaggggccgggagcagcacgccggcgatgtcgcgcagctgaatggcctgctgcatttgcagcgtggcggccatgttattgccggaaaggcccatcaccacctggcgtgcaggcgccacttccaatacggcgtcgagcaccgccagctgttcttctttgctcagcgcggcggcttcaccggtggagccgcagaccaccagaccatcgatgccggcgttgagcaggtgccgcgccaggcgttgcaccgccggcaggtcgacggcgtcgtgattgaaaggggtaaccatcgccacccaaatacccgaaaatgaggccataaaatattccttctgtgtgaccgacagagaagccagatgagaaaattgaaggcggggcgttgcgtgccatccagtcagctcatctgacgggacagcgcgccccggtcaaatgagcgtctgtttctttgatgtaaccgccgccaaaccgccaaggggcaacgcaggcgtcatcagaatatcagcgttgcgtgggtaggccatggcagtctcgcgaaaaggggaagtggggtgataatgaatattcttcatcaggctgtcaatttacaacagattgataacattgttattcatgattcgccggtgaggatgagtttggctaataaataaaaatccccgccgcggcggggagggttggctcagcgcggcgggcgggagccgatggtggcagaccaactgaaagtgtcgccacttggccggtagcggttggctttgcgttctgcacgctccgccttggcgagcttcgctctggcggccatgatgcgcgccaccacttcatccttgaccttgtgctgttcggcgttggtcagcggcctgccatggcttttacgcgccttgtccaattcggttttcacttcccgctgttcgctttccgtcatctctttcaacgtcaactttttcatctgtgccgcccgttcggtgaagttgacttacagtttagcggcgttatatgaccgaaaatgttatgggcataacgaaaatgccccgtaggccggcattacacctcctccagcagatcgtcgacaaagcgccgcatgcgttcggtgcgctgttcggccatctgccgcccggcggcggtctggaagccttcttgcagcttgaacagtttggtttcgaagtggtcgaggcagaaacgcttgtcgtcgtattgacgatgttcggcccgcggatcggcggcgtcatacagcgcgctgcgcatgcggccgccgatatagaagcagcgcgccacgccgataaggccgatagcgtcgaggcgatcggcatcctgcaggatcttcgcctccagcgtttgcggcgggatgccggcggaaaaactgtgcgcttcaatggcgtgagccaccgccgcgatgtccgccggcgcccattccagccgggccagcgtcagcgtggcttgctctgccgccatgcgcgaggccagatggcgctgcggcgaattcttttccaccgcgacggcgtcgtgcagcagcaccgccgcgcagagaatgcgccggtcgccgccttcctgcttgctgatccgacggcagttcttccagacccggtgcaggtgcgcgacgtcatgcgaaccgtcgtccgactcgagggtgagcggcagcaacgtttgtgccagcgcctggtagggggaaaacggttgtaacagctcttgcgtcagcgagggtaaagacacgttcagctcctgttgggggaaatcggtcaatcagcatagccgtgccggatgccgggaggatgacagtaaaacggctattgtttactaaagtgcaacccactattgtcataactgcggtttttgcagcgaaacaagcaacctagaatagccgaattccgccgtctccgcctggtgagagcctgtgtccgcggggatggccggaatatcctcatcagccatgggagaagagacatgccaacccctcttgaaatagtgcgcgcaacctatgaaggcagctccgaagaaaacggccgcaatctgctggcggcgctggcccccgatgccgagtggaccgaagccgccggtttcccttacgccggtacctatatcggcccggagaacatcatcaagaacgtgcatcagcgcctgggcagcgaatggcaaggttaccgcgccgacgtcgatcacttttacgacgccggcgacaacgtgatcgctcagggtttttatcacggcacctaccgggccaccggcaaatccttcagcgcctcttttgcgcatatttatacgctgcgcgccggcaaaatcgtgaagttcgtgcagatcgtcgacagtgctaaagtgctggaggcgatgcagccttaatcgccgctgcgcttgccgaatttgcggtcaaactcgcgccggtaaccccgggccttgttgcgatcgcggatccacaaatagccgcacaccagcgcaaccgctcccgagaaggtgacgttgcgcatatcccggtcataccaaaacaccaacagcgcatccagcgccgcaatcagcgcgatccatttgtacatatgggattggcgccgcgtggcggcgttgagtcgttttaactgtctggcttcgtccaacaccggtttttgctgcatagcgtttcgttatcgtcaggctgttcacgctaaattagcagaatttccctcaccgtcgcaaagattaacgcgcggcgtcatgcggttttcaccgcccctggcgcggcgcagaaaatttatgcgtgggcgcttgaattgttcattgggcatgataggttatttattcgttatttttgggtttttattcataattcgccgtgtcatcaagctgcagcactgggcggttaacgtgatgggttcgacgcatgcggcggttaacttcggcaggaggatgtgatgaacgataaaacggcacgcccgcaggatgtggttcaacaacagcttgacgcctataacgcccgcgacatcgaggcctttatggcctgctgggcggacgacgcccagtattacgagcatccagacacgctgctggccagcggcaaggcggcgatccgtgaacggcatctggtgcgtttccaggagccgagtctgtatggcgaacggataaaacgcatggcggtaggcaatatggtggtcgatcaggaggtggtgacgcgcaatttcccgcaggggcgcggcaaaatggatgtcatcgccatctatgaagtggaacaggggaggatcgccaaagcctggttcaagatcggcccctgcgtgccggatgagggcgcgctctagccgcgcattactgcaacgccatcaccgcctctatttccacacacaccgcgggtgagaacaacgcgctgaccgccatcagtgaacaggctggcagcgcgccatcgaaatagtcaaacagcaccgggcgcacgcccgccagatcggcgatgtcggtcaggaacacgctgattttaatcaatgctttgaggttgacgccttcgctggcggcaatggtggccagctgttcgaggatctcctgcgtttgctccggcgcgctcaatccctgagcgtcggtggcgtaggccgtcaagccggaaacgtataagcgatcgccgtggcgcaccgcatgcacataggggccgcccggcgtcggcaactgcggataattcgtgcgttttaatgatgtcatggtcaaaccccgcgcaagaccggttaataaaatcgacaaacttggttaggatactgaagaaacggcggccaggcgccgcgcaccgatgatatttgagagtatcatccctctttattttatacgtcgtcttcacccgaatgtgacagtgcggcgcagctcggccacaaggacgcatgagacgatgaacccgatttttactccctacctgcaacgctggcaactggaacaggatggcaaagccttcgaaacccacagcagtctgctgatgccggtgcgttaccggggcgaggccgccatgctgaagatcgcccgcgagcaggaggagcgcttcggtggccggctgatgtgctggtggcgcggggaaggcgccgcgctggtgctggcgtggcacgacgacggcattctgctggagcgcgcgcagggcgaaggttcgttggcgcagctggtgcgtgatggcgacgatgaacaggccacgcagatcctgtgccgggcgatcgccgccttgcatgcgccgcgagaggcaccgctgcccgaattgatcccgctgcaggagtggttcagctcgctgtggccggcggcgcaggcgcacggcggcatgctgcgcctcagcgccacaacggcggcggaattgctgagcagcccgcgagaagaaagcgtgctgcacggcgatatccaccatgacaatgtgctcgacttcggcgaacgcggctggctggcgatcgaccccaagcgtttgtacggtgaacggggcttcgattacgccaatatcttctgcaatcccaactacggtatcgccaccgatccggccattttccagcgccgcgtggaacaggtgtgccggttggccgggttggatcgccggcgcttgctgcaatggatcctggcctggtcggggctctccgccgcctggttcatggaagacgggcaggcggctgacattgactttcgcgtggccgaactggcggcgcgcgcgttggatatcccgttgccggacggcgattcagggttcatcctgccagtaatcgagcgaggttgaagggcgctgcaggtagcgcacctgctcgccgtctgcgctgcgcgccatcgcctggtatttgccggaatccgggtacatcaccagctccggctgttcgcgcgtgctgacggacaggtacttcagcggcgcatcggaagtgttgatgatctggtgcgggtattccgggcccggcggaatgaaaatgacatccccgctgacgatcggcagcatttctccggccactcgcagcgtaccgctgccctccagaatgatgaacatttcctcctgagcgtagtgaaaatggtaggggcaggaacgcatgcccggcgccacacaatcgaaagaggcgcccagcttgtcggcggcggtgccggtgccgagacgggcgccgacgctgtcatacaacggcggccgccggtcatgtttcatctctacctgttcgacattgcgtatcaggcgctgagccaacagcgcggctttctcagtcataagcttccttggtgacggcgtcacttattaggtgaattgacagtcagacgacagagaaagtgaaggcgccacggcgtcgcttgtcaatgtagaccgcccgttacgcctcggaggttcgccgcggcagcgacagcagcagatgggcgatggcgccgccgacaatgccccagaaggccgaaccgatgccgagcagcgtgacgccggaagcggtgatgaggaaggcgatcagcgccgcgtcgcgctgtttttcatcatgcagcgcgcgttgcaggctgccgccgatggtgccgagcaacgccagcccggcgatggtgtggatcagggcgtccggcaacgcgctgaacagcaggccgatggcgccgccgaacagcccggccagcaggtagaaaccgccggcggccaccgcgcccatatagcgccgctgcggatcgggatgcacgtccggccccatgcaaatggcggcggtaatggcggcgatgcacaccgagaaaccgccgaatggcgccagcagcagcgcggtcagcgccgtccaggcgatcagcggtgaggtggggacacggtaacccgccgcctgcagcgtagcgatcccgggagcgttttgtgaagccatggtcaccacgaagaagggcacgccgatgccgagcagcgtcggccagctgaaatgcggcgcgataaattccggcacggcgaacgccggcgtctgttgcgtcagctggatatcgccctgcagcgcggcgatcgccagcccaatcgccagcgtcaatacgatggcgtagcgcggcaggtaacggcggctgagcagataggtcagccccataccggcgctgaggaggaaattgagctgcagcgaagcgaaggcgtccagcccgaaacgcagcaggatccccgccagcatcgcggcggaaatcgcctgcggaatataatccatcaggcgagcgaacagcccggtgacgccgcagagcaggatcagtcccgatgcgaagataaacaccccgatcgcctcgttgatcggcgtgccgggcaggctggtgaccagcagcgccgcgccgggcgtcgaccaggcggtgaggatcggggtgcgatagtaaagcgacagcccgagggaagtgacgcccattgcgatcccaagtgtgctcagccagccgccgatctgcgccggcgtagcgcccgcggcggcggcggcctggaaaatgatggcggcagagctggtgtaaccgaccagaacggcgacaaagccggccatgatggcgggcagggtcagatgacgcagggtgacggcagggcgcatgagcagctccaatcggtggttgtgcgttataacgcacggcaagaaatcagcatagcatcgtgcgctatagcgcacaagcgggtataatctggctcgacacgcagaggagaactggatgcaggaacttgccggccatttggcgcacacccttcgcacgctgcgcgcacagcgcggctggagcctgacgcaggcggcggaatacaccggcgtcagcaaggcgatgctcgggcagattgaacgcggcgagtccagcccgacggtggcgacgctgtggaagatcgccaccggtttcaacgtggcgttttccgcctttcttgaggcctcacccgcccagcagcaggcgacgttgcaccgctatggcgatctgccggtatacgatcaggacaacgccgacatgcgcgtggtgccgctgtttccctacgatcgccagctgggtttcgatatgttcgtcatcgatctcgcgccgggtgcgctcagcgaatcgtcgccgcatgagccgggcgtgatcgagcatgtgatcgtgatcagcggccgattagaattggcgatagacggcgcttggcacagcctggcggccggcgaggcgatgcgctttcaggccgatcggccgcatgcttaccgcaacgccggttcgcaaacggtgcgcatccacgatctgatccactatcctcaatcctgattcaacgcggcggccatgggctttgactccgtgccgccaaacgcctaccttgttgaaaatgactcttatttcacaggctgtcgcccatgacggggcggcgttgcagccgactcaaaaggagcttgattttgccggtcaccaatcgacgtcagttcattaaactcagtgcgcaaaccgcaggagccgtattcgcgatgacttcattacccaacagtatccgcctggcgatggcggcggagggcggcgcggccgccggcgatgaattcctgtggctggaagagctgcagggtaaaaaagcgctgcactgggtgcagcaggaaaatcaacgcaccgtggcacgtttcggtcagggcgaagactttcagcgcattgagcgcgaagtcctggatatcctcaataaagacacccagatcccgtgggtgagcaaacgcggcgagtactattacaacttctggcaggatcaggccaacccgcgtggcctgctgcggcgcaccacgctggacgagtaccacaaggccaaaccggcctgggagacggtgctggatatcgatgcgttgggcaaagcggagggcaaggattgggtttatcagggctcgcaaccgctggcgccggaataccgttattgcctgatgcagctgtcgccggacggcggtgacgccaccgaaatccgcgaattcgatctggttgccaaacgtttcgtcaaagacggtttcaacgtgccggtggcgaaaagccgggtttcctgggtcgatcgggacacgctgttcatcgccaccgacttcggccccggctcgatgacccagtccggttatgcgcgcatcgccaaacgctggcggcgcggcacgccgctgagcgccgccgaaacgctgtacgaagcgcagcccgaggacatggcggtcttcgcctatcacgatcgcacgccgggctttgagcgcgatttcgtcggccgcagcctggacttctatcgccgtgactatttcttgctggctcaggatggtcggcagaaaaaaatcgacatcccggccgacgccgagctggacacgcatcgggaatggctgctgatcaaaccgagcagcgactgggaagtgggcggcaagcgttatccgtccggcgcgctgctggcggccaacttcgatgactatctggcgggcaagcgcgagctgcagctgctgtttaccccgacggcggagcaggcgctgagcggctacagcggcacccgcgatcacctgatcctcagcatcatggataacgtggtcaaccggctggaggtgctgacgccgcagggcggcagctggcagcgtcgtccgctgggcaaccccggtgccatcagcaccctttccgccggcggcatcgacgaagagagcaacgcctatttcctgaccgtcagcgggttcctgcagccgacctcgctgtatatgggtaatctcgacggcggtgaggcgacgctgctgaaacaggcgccgcaggactttgacgccgccggctatcaggtcagccagcatttcgcgcgctccaaggacggcacccgcgtgccgtatttccagatcgccgccaaagatctcaagctggacggcagcacgccgacgctgctgtatggctacggcgggtttgaagtgccgctgttgccgggctatctcggcggcaaggcgccggcctggctggagcgcggcggggtgtacgtggtggccaacatccgcggcggcggcgaatacggcccggcctggcatcaggcggcgctcaagcagaaccgccatcgcgcctatgaggatttcgccgccgtggccgaagatctcatcgcacgcaaggtgacctcggcgccgcatctcggcgcacgcggcggcagcaacggcggcctgctggtgggcaatatgctgacgctgtatccgcagctgttcggctgcatcgtctgcgaagtgccgctgctggacatgcagcgctatacccagctttccgccggcgcgtcgtggatcgccgaatacggtgatccgagcaagccggaggagtggacctacatcaagaccttctcgccataccacaacattcaggcgcagacggcctacccgccagtgctgttctataccgcgaccagcgacgatcgggtcaacccggcccacgcccgcaaaatggcggcgcgcatgcaggcgatggggtatcagcaggcctatttctatgaaaataccgaaggcgggcacagcgccgccgccgacaagcagcaggcggcgttccacagcgcactggtaagcgaattcatgtgggccaacctgagcggcaaacccaattcagcgtaagcctttttcttgcggcataaaaaaacaccggggcgttaaccccggtgtttttatttacgctcaatccgccggcggtcagcgagccgcagcggcttcctgcgcttgctgattggcgtcttcggtggtgtccagcgtcatgcggtacagcttcggcgcagtcagcatcatcaggatagcgatgacggcggtgacgatgccgatctgcataaacacatggctgtagatggccagcgaagcgtgcgcgtcgttgatgtcgcttggcacggcggtcagaccggcaaccttaccggcgatcagcgcggcggcggcggtagtcaggaaccaggagcccatgatgaagcccatcagacgctgtggcaccagctgtgccaccatcgccagacccaggccggaaatcatcagctcgccgatgctctgcagcgcgtagctcaggatcagccagttgaccgacacgatgccctgttcgttggcgaagctggcgccccatggcagcaccaggaaggcgcaggagcagaggatcatgccgaaagcgaacttgtgcggcatcggcaggcgatcgcccattttgttatacagcgcggccagaatcgggctggcgagcatgatccagaacgggttcaacgcctgatactgctccggctcgaaggcgacgccgaagatgctgtgttccacgttatggatggcgaagaagttcagcgaggttggcatctggctgtacagcacgaagaacaccaccgcttccagcatcagcaggaaggcgacgatcatcttgcggcgtgcggcgccgtgcagggcgaaggtttccttggcgaacaccagaacgataccggcggaaacgagggccaacgcccagcgcgcgatcacctggttgtgcagcagccagctggacacggcgatcaacgccacgatgccgaccagcaccatcagcagcttcggcagatgcagcggcttgaagtcaggtctggagccgttttccttcacccacttgtggcacatcataaagttgaccagggtgatcagcatgccgaccacgctcagggagaacgccacgctccagccgtatttcgccgccagccacggggtggccagcatggagaagaaggaaccgatgttcaccgacatgtagtacatggtgaaagcgccgtcgatgcgcgggtcatctttctcatagcaggtggacagcagggaggacgggttagccttgaacaggccgctgcccacggcgatggtcgccatgcccatgtaaacccagaagatgtcgtggccggagtaggccaccatggcgtaaccggcggccagcaccagtgcgccgagcacgatcacgcgtttggcgcccagcaccttgtcgcccagccagccgccgatggcgacgaagccgtataccagggcgctgaaagaagagaacagggtgatggaatcggcttcgctcatgccgagcatcttgaccagataaaccgccatgatgccctgcaggccgtaatagccgaaacgctcccacagttcgatcgagaagatcaggtagaacgctttcggttgtttgaacgcgttaaggctaacgctctccgggtgttggttgtttgctgttgacactggtacctctgttttttcgcagcccgtctttggaggacgggaaagtacaaaagttgatgcggaacggcatccttttgcgttgttataggatggggacggcggttaatgttcactatctttgtcaacgtggcaagcagtttgtcatattcggttacatttaacgctcgcaggattatgctgcgatgttgcaaatgttatgcagtattaactttcgggttttaatggtttgccgattttttgttttgattaaaagctatacggattttaaacagggatatattctgctgaattgctattttttagcgcatcagtgtatgtgtggttgttaatccattggaatgttgtgcatatgcagcgttttgtaaaattatagaaatttaggaaaacgggactggcatttgtgaacgccttgtgatcctgaaagcgtgacgttcaccgcaatttttgactaatttttcgcttgaaaataacgcggcactgagtttttcactgaaaaccgcgataacgccggggttactgctgcgcgatatcacatttccgataaaaaagaggcgctggcggggggaagtggcggcgacgggggcggtttgccgcacccgtcagattcaggattccggataaaccttctctttatactcgcacaggtcttcgatgatgcaggagccgcagcgcggtttgcgcgcgatgcaggtgtagcgcccgtgcaggatcagccagtggtggcaatcgaccttgaattcggcgggcaccaccttcaacagcttctcttccacctgatcgacgttcttgcccggcgcgaagtgggtgcggttgcacacccggaagatgtgggtgtccacggcgatggtcgcccagccgaaggcggtattgagcaccacgttggcggtcttgcggccgacgcccggcagcgcttccagcgcggcgcgatcttccggcacttcgccgccgtgcagctccagcagcatacggcaggttttgatcacgttttcggccttgctgttgaacaggccgatggtcttgatgtactccttgacgccatcaacccccagcgccagcatggcggcgggggtgttggcgaccgggtaaagtctggcggtcgctttgttgacgctcacgtcggtggcctgcgcagacagcagcacggcaatcagcagttcaaacggcgtggtgtacaccagctcggtggtcgggtgcgggttgttgtcgcgcagccgggtcagaatttccagtcgcttctgcttgttcatcaggccttctcagcacgtccttgttccagcagcggttccgccgccacggcgcgggctttgcgcgccttcattttttcgtcgatcagatacttgaccgccagcagcagccccaggccgataaaggcgcccggcggcagcatcgccagcaggaatgggctgtcgaaatgcaccacttcgatgcgcagcgacttggcccagccgcccagcagttggtcggcgccgtcgaacagcgtaccgttgcccaacagttcgcgcatcgagcccagcgtcaccatcacgccggtggcgccaaggccgatggccatgccgtccagcgccgagaggccgaccggcttcttggcggccaccgcttcggcgcggccgaccacgatgcagttggtcacgatcaatggaataaagatgccgagcgactgatacaggccgaaggcataggcgttgatcagcatctgcacgatgctcaccaccgcggcgatgatcatcacgtagatcggaatacgcacttcgctcggcacccagcggcgcaccgcggagatggaggcgttggtcagcgtcagcaccagcgtggtggccagccccaggcccagcgcgttggtgacggtggaggtcaccgccagcaacggacacatgcccagcaactgcaccagggcggagttgtttttccacaacccctgaacgatcaattctttggcttcactcattcggcggctccacacgcaggtaagctttcaagtttaggcggcagcgtttccatatacaacgccgtgcggcgcaccgcattgaccaccgcccgcggggtgatggtcgcgccggtgaactggtcgaacatgccgccgtctttcttcaccgcccagcgtttgtcgtccgggccgtcgattttcttgccgctgaagaaggaaatccagtcggaaatgcgcagttcaattttgtcacccagcccaggcgtttcgtggtgttcaatcacccgggtgccgagcaccgtgccgttgaaatcggcgccgaccagcagcttgatggcgccggagtagccgtccggcgcggtggtttccagcgcggcagccgtcggctgcccgtttttgcgcgccaggtacaagcggtgcggcgcgccgtcgcccagcgccggatcgctgaccagcaggcattcgttctgcatgatgttgtcgtagttttccggcggcaccacctgatcgagcagcgctttttgctgcagcgccgcctgatgggcgatggtggttttcgtcagggcgtaaaccacggcggtcaggccggtggtgaccgccgcaaacaccgccagcgtggtgccgtgctttctcatggaattcagcatggcggctccttagcgatggccgtacacgcgcggctgcgtgtagtggtcgattaacgggacggtgatgttggcgagcagcacggcgaaggccacaccatcagggtagccgccatagacgcggatcagccagaccagcacgccgatcagcgcgccgtagattaagcggcccttcggcgtggtggcggcgctgaccggatcggtggcgataaagaacgcacccagcatgctggcgccggagaacaggtggatcagcggtgaagcctgatgcgccggatcgatccaccaggccagaccggaacagaaggcgatggcggccaacatgctgaaagggatttgccaatggatcaggcggcgcgccagcataaacaggccgccggccaggaaaccgaggttgacccactgccagccgataccggccagcgcgccgccgaacagcggctgctgcaacacctgttccacgctgtggccgctgcgcaggccggttttgaagccgtcgagcggcgtggcctggctgatgccgtccacgcccatctgcagttcgtgcagcgtcgcgccctgtgcggtatggccgctgaaaatcgccagcagcgtgtcgtggagcgaaagcgcggcggcgcgcagttcatccggcggcagccaactggtcatctgcaccgggaaggagatgagcagcactacgtaaccgaccatcgccgggttgaacgggttctgcccgaggccgccatacagctgtttggcgataacgatggcgaagaaggtgccgatgacgatcatccaccacggcgccagcggcggcaggctgatgccgagcagcagcgcggtcagcagggcggagttatccgccagccggctgcgcaccggcagcttgcgcagcttgaggatcgcgccttctgcagccagcgcgacgatcgccgccagcgccacctgaatcagcacgccgtagccgaaaaaccaaatctgcgccgcaatgccgggaatgcacgccaacatgacccatagcataatgcggctggtgctttgctggttgtgggtgaaaggcgagctggcgatgtgtaagcctttggcggctgtgggtgataccggcctgaacttcatagagtaacgataccttctgcgccgcgcctgcggcagtttcgatgcgccatactgcgggcgcggcaaaaatgatagccgagcattctacctgattcgatgcgagggtaatacgccttaatgataggggtattcggctttccgcacatctggcgatcggggtggcgcgatttgatttttttttggccgggaaatgggctaacgtgaggaattgtcagtggaacttgtgccgccatcgaccgcggaaaatggggtaaacgtctgaatgagatatcatttttctccagatttccgcacaaaataacaactttcacataatccgtgtaggttactatcgcgaacattattgagtcagtgaatccataataatgacaaatgaagacattttttttattgaagagctaattgagtgggtggagatacatctggagaaacggccaaacctggatgaagtcgcgcgtatttcgggctattccaagtggcacctgcagcgtaaattcaagcgtattaccggcattcaactcgccacctatatccgttcgcgcatcctgacgcgcgccgcggtggcgttgcgcattactcgtcgctccatcatcgatatctccgatgagctgggcttcgactctcagcagacctttacccgcatgttcaagcagcgcttcggcactacccccaatcgctaccgctcgatggagcactgggacgtgaaaaacctgatgccgcgctttaacttcgaagccagctacggcgccggttattacccggaagtgaagcggctgacgctgcccgacatgcagctggtcggcttcactcgtcggctggatttcgcctccgaacaggaactggagtactcttcctgcatggcgatgaaggatgagattttcaacgacttcttcaaggggctgcacgtcgactgtcggcggatttacagcatctactcccctcatgccggggagggcgacgagctctcatccacgctggtgatggcggtcgatcctgaacacagaaaggatattctttccaaccatcagatagacaccttccatttgccgagccgcgagtttatctctatcaaccataaggggtcggcgaaagagtgtttgcagtttttcggctacctgatgtcgcatgtgatgccggggttgaaggataaagtgcgcggcagtatggaaatggagatcattcaaaccaaagagtggaatcctgaatccaaactgcgtcagattgaagtggattacacctacctgatttctatcgattaaacggcgcctggcgtcagccgggcgccgctatcattatttgtcttccgtttccgccgccagcgattctctggcggcttttttggccttggcgcgggcgatagccgccgcgaccgccgccttgcgcggatcttcttcggctgcagccggcgccggttccgtcggtgcagggtcatccgcctgctgcgccgctttcttggccttggcgcgggcgatagccgcggcgaccgccgccttgcgcggatcttcttcggcggcaaccggcgccggttccgtcggtgcaggggcatccgcctgctgcgccgctttcttggccttggcgcgggcgatagccgccgcgaccgccgccttgcgcggatcttcttcggcggcagccggcgccggttccgtcgatgcaggggcatccgcctgctgcgccgctttcttggccttggcgcgggcgatagccgccgcgaccgccgccttgcgcggatcttcttcggtggcagccggcgccggttccgccgatgcaggggcatccgcctgctgcgccgctttcttggctttggcgcgggcgatagccgccgcgaccgccgccttgcgcggatcttcttcggctgcagccggcgccggttccgtcggtgcaggggcatccgcttgctgcgccgctttcttggcttttacgcgcgccagtgccgccgcgaccgccgctttgcgcggatcttcttcggctacagccggcgccggttccgccgatgcaggggcatccgcctgttgcgccgctttcttggcttttacgcgcgccagtgccgccgcgactgctgccttgcgcggatcttcttcggctgcagccggcgccggttccgccgatgcaggggcatcagcctgctgctctgcctttttggccttcacgcgcgccagggcggccgcaacggccgctttacgcggatcgtcctctgttgccgccggggcggggctgtctgctgccggcgcctctttgcgcgctttcacgcgggccagcgccgcggccacggcggctttacgcgcgtcgtcgccggcggtcgccggtggcgcttccgtttccacctcggcagccagctgggcacgacgttcgcgcgcctgcgctttacgtgcttcgcgggcagcgatcatctcgctgttatccggctgctggccgttgaccggcgtaaccgccgcttcggcattcttgctgcgcacgcgcgccagcgcggcctgcactgcgccctgatcgtcgtcgttcagtttgacggcggcctttttatgtcgctcttcacgcgccagtttttcacgctccagacgcgccagcttggcctcgtaacgcgccttggcctcggcggtgcgcgccgcttccagatcgatagccttgatttcggccttttcctgccggtagtactgtaccagcgggatattgctggggcagacgaacgcgcaggcaccgcattcgatgcagtcgaacaggttatggttgcgcgccttgtcgtgctcctgcccgcggctgaaccagtacagctgttgcggcagcagcccggcagggcaagcgtctacgcacaggccgcagcggatgcaggactgctccggttcctgcggcgtcatttcatccaccgtcggtgccagaatgcagttgctgatcttgacgatcggcacgttcagcgcgggcagggtgaagcccatcagcgggccgcccatgaccaccatctgctgcgcctgcgggcggaaaccgacgaagtcgagcaggtgctgcaccggcgtgccgatgcgagcccacagattgccggggcgctcgatcgcctcgccggtcagggtcactacgcgctcaatcagcggttcgccgtcgacgatcgctcgcttgatggcgaaggcggtgccgacgttttgcatcaatacgccgatagcggaggagtgcttaccgtgcggcacttccttgccggtcaaaattttggtcagctgcttggcgccgccggacgggtatttggtcgggatgacgcgcagcgcaatgccgggctggccgcgcaacgcctgtttcagcgccgcgattgcctccggtttattgtcttcgatgccgatcaacgtgagcttgggttgcagaatgtgttgcaggatctgcgtgccttcaatgatctgatcggcatgttcctgcatcagacggtcgtcggcggtaatgtaaggctcacactcggcggcgttgaggatcagcgtttccacgccgttcatgccgccttgcagtttgctagcggtcggaaaacctgcgccgcccaggccggcgatgccggcctgatgaatacgttgaatcagttccgcggcgggcgattggcgatagtccgccaccggatcgcgctcgcaccagcggtcttccccgtctgcctcgataatcacgcacagctccgtcagcccggacgggtgcgcggtgatgtgcggcgtaatggcgctgacggtgcccgaggtcggggagtgcaccggcacggtgcggccgcggccgacggtcagcggctggcctttcaacacccgatcgccggcgctgacgcacagctcgccttccggccccagatgctgttgcagcggaatgataaaggtcttgggcaggggcgcgacacgcagcggcgcaccgctggactgcgttttcatttccggtggatggatcccgccgtcgaaatcccagatccggtcttttttaaaggcggcgaacagattaagcatgttgctccacgtggatcacttgcaccgggatcgtcttcatgtcccacttccagttggcggtggtggtggcgaccggtctcatttcaatacagtcggtagggcaaggggcgacgcacagatcgcagccggtacagaggtcggtaatgacggtatgcatggcgcgggtggcgccgacgatggcgtccaccgggcaggcctgaatgcacttggtgcagccgatgcagttggcctcgtcgatataggccactttacgctccggctcggcggcggcttcgctgcccagcggctgcggctcgacgttgagcagctccgccagtttcagcatcacctgttcgccgcccggcgcgcatttgttgatcatctcgccgttggccaccgcctcggcataggggcgacagccggggtagccgcactggccgcactggctctgcggcaggatcgaatcgacctgctcggcgaccggatcctcttccacctcaaaacggcgcgcggcgtagcccagcaccagtccgaacagcagcccgagcgcgcttagagccgcgatagctatccacaacgcagtcattagaatttcaccagcccggtaaagcccataaaggccagcgacatcagcccggcggtgatcagcgcgatcgaggagccgcggaacggcgccggcacgtcggccaccgccagacgttcgcgaatggcggcgaacagcaccatcaccagcgagaaaccggcggcggcgctaaagccgtaaacggcggactgcaggaagttgtagccgaggttgacgttaagcagcgccacgcccagcaccgcacagttggtggtgatcagcggcaggaagatgcccagcaggcggtagagcgccgggctggttttgcgcacgaccatctcggtgaactgcacgacgacggcgatcaccagaatgaaggagagcgtgcgcaggtacaccagatccagcggaaccagaataaaggtgttgatcacccaggcgctgacggaggccagcgtcatgacgaaggtggtggccattcccatgccgatggcgctttccagcttcttggaaacgccgaggaacgggcacaggccaagaaacttcaccagaacgaagttgttcaccagtacggtgccgacaaacaggagcaggtattcggtcattgcgatgcctaaaaaaataaaagccgcctattatcgggaatcggcggccggacgacaacatatgaatcgcaggggtattgccttttttggcgaaaatttacacaaaatacccgataaaacgtgctgcaaccgcctttaacgttcggtaaaggtgcctttgacccgctgcgagcgcttgatataaggcaccagcagcgccgccatcagcagcggccagccgaggctgcgcaccgccacttcatccggcaccggcgcgaaggcgaaggctttcaccgccaggatcaccgtgatcagcagccataacaagaacagtttagggaagcgctgcgaccgatggcagaacagaaacaccagccacagggtaaagccccacatcaagagcgtggtcagcaccgaaaagtaccattgcagggtaaacgcctgggcgttggtcaacagatagtcgcgcgactcgggcatgaagatcgccatggcgtacaggagcagcatcaggctggcgctgagcagggtaacgatcagataggccagcggggccagcaaccaaccgccgatacgagagtattcagcttgagacattaaacggcttcctgattgaatcggggatcacaggcggcatagcttagcgggtaatataggcttcgtcatctctatcaagcggatagctcggcatcgcgacgccgggccgcacgtttggctactccggcctcgctttgaattaacatctcatttacttcttgttccatccggccgcatggtgtcaaatcgaaagggtctgtcgtgagcctgcaagaggaaatcccatggctgaaaaaattcgtgtcgggctggtcggttacggctacgccggtaaaacctttcatgcgccgctaatcgccggtacgccggggctggaactggccgccgtttccagcagcgatgccggcaaagtgcacgccgactggccgtcgatgacggtggtgggcgatgcgcaagcgctgttcgccgatccggccctcgatctgatcgtcattcctacccccaacgatacccatttcccgctggcgcaacaggcgctggccgccggtaagcatgtggtggtggataaacccttcaccgtgacgctgtcacaagctcaggcgctgcaacagcaggcgcagcagagcggtttactgctgtcggtgttccacaaccgccgctgggacagcgatttccttacccttaaggcgctgctgaacgacggttcgttgggcgaggtggtgtatttcgagtcgcatttcgatcgctaccggccacaggtgcgccagcgctggcgcgaacagggcggcgccggcagcggcatctggttcgatttggggccgcatctgctcgatcaggcgctgcaactcttcggcaaacccgagcggctgttcgtcgatctgggtgagctgcggccgggggcgcaggcggtggactatttccacgcgttgctgaactatggcgatcgacgcgtggtgctgcacgccagcatgctggcggcggcggagagcccgcgctacgtggtgcacggcacccgcggcagctacgtcaaatatggcctggatccgcaggaggaccggttgaaggccggcgagcgcttgccgcaggccgattggggctatgacatgcgcgatggtgtagtgacgctgtcacgtgacgatctgctggcggaacagccgctgctcaacattcccggcaattatccggcttattacgcggcggtgcgcgacgcgatcgccggcataggcgaaaacccggtgccggccgccgacgccatcgcggtgatggcattgattgaactggggttggaatcggcccggctgcagcaggcgctgccggtggtttgataccgcccatttctctgtgcccggcgcaacgtcgggcctttttacgactttacgtgcaaggaaattcgtttcatgtcctggttgcagcgtttgcgcattgataaatttttgctggttctgattttggtggtgatcgtcgcctcgctgttcccctgcgaaggcatctggaaaaccttcttcgaacatctgaccaccgccgccatcgcgctgctgttctttatgcacggcgccaagctgtcgcgcgaggcgatcgtcgccggcatgagccactggaagctgcatctgctggtgttcctcagcacctttgcgctgttcccgctgctcgggctggcgatgaacctgctggtgccgggcatcatgacgccgacggtctatctcggcttcctctatctgtgcgcgctgccggccacggtgcagtcggccatcgcttttacctcggcggcgggcggcaatgtggcggcggcgatctgcagcgcctcggcgtccagcattcttggcgtgttcctgtcgccgctgctggtgggggcgttgatgcatacccagggcggcaataccgacgtgctgcacgccattggctcaatcattctgcaactgatggtgccgttcgtgatcggccatctggcgcggccgctgatcggcaagtggatcgaccgccatcgcaaactgattaacctgaccgaccgttcgtcgatcctgctggtggtgtataccgcgttcagtgcggcggtggtggaagggatttggcaccgtatcgacggctggtcgctgctgaccatcctggtgatgtcgctggtgctgctgacggtggtgctggtgatcaacacctacgcggcgcgctggctgggcttcaacaccgccgatgaaatcaccattgtgttctgcggctcgaaaaagagcctggcgaacggcatcccaatggccaacgtgctgttcccggccgcggcggtgggcgccatggtgctgccgctgatgattttccaccaggtgcaactgatggtgtgcgcggtgctggcgcagcgctatgcgcgtaaaaccgccaaacagcgggccgaggcggaggcgctggcggccaaataggccgcaggccgctaacggcggcccagcgcgtcgagcagaaagtcggcgcgctcatcgggtgaggcgcgcggcagctctcgcagccgatagccataacggcgatagatggccaccatcgcccgataggtttgctcggcttcggcgaaagactgttttctctcgctgtcctgcgcataaatcgctcgccacggcggggcgatgaacaccgtatcggcatagcgaaaggcgtcgatcgccgccgttaagggggcggggatcgataatccgcacagcgtcaggtaaccggcgatatccggcaggccacgatcgaagaaccagcatgttgcgcccgtcgcttcgcgccatgaacgcagttcccaatcgagcatccgctcggcgaaagcctggcgatcgccccacggcagcgcattgccgccaatactcacctgatcttgaataatcgcccggcccgcctcctgggaatgcgggtaaccgcggcgatgaagaacgtcgatgagcgtgcttttgcccgaacccgggccgccggtcagcacgatacggcatagtttgtcagacatgcggaattcctctcttgcaacagagtgatggggtgaaaacagcgataaagacgagcaggcggaagaaaacggggaatgagaagaaggcgccgtttggcgcctggggagattagccctgaactttggcgcgcagcgcctgtttttcctgctcgctgaggaaagccagcttcaggccgttttcctgcgcggtgcggatttctgccggcgtcagcccggcctgcggcgcggcgacgcggtactcatgctcgatctcgatgccctgaaccgccggatcgtcggtgttgatcgacgccagcacgccgtggcgcaggaaggtggccagcggatgctgcgccagcgacggcacggtgctggtttggatgttggaggtcaggcaggactcgatgccgatgccgtgttccgccaggaagtccatcagcgccggatcttcgaccgctttcaccccgtggccgatacgttcggcgcccagctcgcggatcgcctgccagatgctttccgggccgccggcttcgcccgcgtgcacggtgatgcgcaggccggcgtcgcgcgcacggttgaagtgactgaggaacaggctgccggggaagcccagctcatcgcccgccaaatccaatgcggtaatgccgtcgcggtgcgccagcaacccttccagctcctgcaaacaggcggcctcgccaaaggtgcggctcatgatgccgatcaggcgaatgtcgatatcgcgatcgcggcagcccgagcggatcccgtcgatcaccgcttccaccacgccggcgaccggcagctgatgcttcatcgccatgtagtaaggggaaaaacgcagctcggcgtagtgcaggccggcgttggcggcgtcctcgacgttttcgtaggccacccggcggcaggcgtccagatcgcccagcaccgctatgccccagtccagtttctgcaggaagctgaccagatccggttcggcgtgggtgatctgcacgtgcgggcgcaggctctccaaatcgttggccggcagggtgaggttgaactggcgaccgaggtcgagaatggtctgcgcgcggatgttgccgtcgagatggcggtgaatgtcggtaagcggtaggcggggatcgatcatgctgggcactcgctaatttatcgtaggtaaagtgcagaacagtataaaaacaaatgaatgaaacttgccatctcgttgcataaaaaagtgacttgcatcacaaataatgcgaggagtatcgcattatcgtcgtgaatcaggctttcaacacgctgacgcccgcctgctgcaacggcgcgatcaatgcgtcgtcggtggcgcgttcaacgatgatggtatgcgccagcgtaatgtcaccgatcgcatactgcgaggcggcgttaagcttggcggcggaggccagcaccacggtttccgccgcgcgggccgccagtgcccgcttgatgtaggcctcttccagatcgccggtgctcagccccgcagtggggtgcacgccggtcacgcccataaaataaatatcggcgcgaatatgcgacatcgcttccaccgcggcggcgccgacgctgacgatcgaatgcttgtacaacctgccgccgatcaggatcacctccaccgtgggatgatcggccaggcccacggcgacgctggggctgtgggtgacgatggtggcgttcaggctgagcggcagctgcctgaccagctcggcggaggtggtgccgccgtcgatgatcaccacctggccgggggcgatcagcgccgccgccactttggcgattgcgcgtttggcgccggattccaactgattgcgttcggcgaagctggcgatggcggatgaaaccggcagggcgccgccgtgcacccgctgcagcaacccctcggcgtccagttcgcgcaggtcgcgccggacagtgtcttccgacagcccgaacagctcgctgagctgcttggccaacacctggccgtcctgagccagtttctccaggatgattttcttgcgctggctggtcaacatggccatttttccctcaaatttgttttgcacgaaatatcttgatcatacacgaaactgcacgatagtatcaatttccttcctctggcggagtaaaccgatgatagccaccaaagacagggttcgcattgtcgaaacccgggtgttgtccgatgactggtacctgctgaaaaaaaccacctttgattttctgcggcgcgacggcgtctggcagcggcaaagccgtgagacttacgatcgcggtgacggcgcggtgattttgctgttcaaccggcaggcgcagacggtgatcctgacgcgccagttccgctttccggtgttcgtcaacggtcatgacggcatgctgattgaggccgccgccgggctgctggacaacgcgtcgccggaggcgcgcatcagagccgaagcggaagaggaaaccggctatttcgtgcagaacgtggagaaagtgttcgaggcgtacatgagcccaggttcggtcaccgagaagctgcactttttcgtcggtgaatatcaggcgggcgatcgcgtcaacgagggcggcggggtggcggcggagggcgaggatctggaggtgatcgagctgccgctggcgcaggccctgcaggcgattcgtcagggcgcgatcgttgacgccaagaccatcatgctgctgcagtttgtcgccttgaaccggacgttggaggaagaacgatgaaagcacaacaaatcctgatcgccggcccctatcgcagcggcaccgatggcgatccgcagcgtatcgccgccaatctggcgcgcctggaacaggcggcgctggcggtttacctgcggggacacgtgccggtgatcggcgaatggctggcgctgcctttggcggcggcggcaggctccactcaggttggcgatgcggtgagcgaggcgtttctttacccggtggcccatcggctgattgcgcagtgtcaggcggtgtatcgcatcgaaggggcatctgcgggagccgataacgacgtgcggttggctaacgaatggggattgacggtctatcgtcatctggaggaaattccgtctgttcaggcgtaaccgaggggcgggcagaggctcgccccctcgcgttattgctcgcccagcaccatcctcaacccggcgatcagcttgtccattccggcctccagcttgccgcgcgggcagccgacgttgagacgcaggaacccgcggccttcctcgccgtaggtaaagcccggcatgatcgccaccttttcgcgctcgatcagcgcctgctgcagcgcccgatcgtctacggacagcggccgcagatcgatccaggccaggtaggtggcctgcggcgggcgccagcccagcgcgggaaacgcctgctccagccgttcggcgacgtagctcagattatcctgcagatagtcgcgcagggcgtccagccagggttcgccgtggcgataggcagccacgtgcgccgccaccgccagcaccgccggcgaggagaggccgtcgcgggatttgagctgctggaagtaggcttcgcggctggcgtcatcgctgataaagccgtaggcgccggtcagcgccgggatattgaaactcttggagccggaggtcagcaaggcccaggcgccggtcgccacctggctccacggcgtatggcggtgttccccccatgccatatccatgtggatttcgtcgctgatgacgcgcacgtcgtggcgctcgcacagttcggccatctgctgcaactcgtcgcggcgccacactttgccggtgggattatgcgggctgcacagcagcaggatcttggtttgcggccgcgccagcaacgcctcaaggtgcgccatgtcgcagcgccagtcgtcgccggctttgtgcagcgggcaggccaacagctggcgttggttggcgaggatcaccttgtagaaggcgtcgtaggccggggtatgggtcaccacataatcgcccggtacggaccattggcggatcagctgcgccgccatgtagataacggaagggccgtacaccgccgttgcggtgtcgatggcgacgttgaaacgttgctgataccagtggcgcagcgcgccgagaaaatcctcgtgctgccagcggctgtagcccagcacgccgtgctgcaggcgttgctgcaacgcctcgagaatgcacggtgcggtggcgaaatccatatcggagatggtgaacggcagcaggtcgtcgctgccgaaacgatcggcgatatagtcccactgggtgcaccaggtgccgtggcggtcgatcggggtggagaaatcaaacatgggtggctccctgcagcgccgcggcaggttgcgccgtggctatcagtgagtctaattcatctttcaccgattgcacctgcgggccgatcaccacctgcagattatggtcgttgagatgcactacgccgatagcgcggttggccttcagcgccgcgtcgtccacccggctcatgtcgttgaccgacaggcgcaggcgggtgatgcagttgtccagcgtgataacgttgcccgggccgccgagggccgccagaatcgccggcacgttgtagccggatttgcccaccgcgccgctcggcgcgctttggctgacggcgctgtcgctctcacggcccggcgttttgatgttaaagcgctggatggcgaagcggaaaatggcgtaatagccgacgaaccagacggcggccaccaccggcaccagataccacttggtggcggtgccgtgcagaatgccgaacaccacgaagtcgatgatgttgccgtcggtgttgccgatggtcacgcccagcagcgccatcacggtaaagcccaacccggtgagcagcgcgtggatcagatacaggaacggcgcgacgaacaggaacaaaaattcgatcggttcggtggtgccgccgaccacgcaggccaccacgccggaaatcaacagccctttgattttgtgacgattctccggtttagcgcagtggtacatcgccagcgccgcgcccggcaggccgccgaggaacgccggcattttaccctgtgacaggaagcgggtggcgctctcggcgaagccggtggtggtcgggcaggagagctgcgcctggaagatggtcagggcgccgctgacgctgtggccgcacacctccatcgtaccgcccgcctcggtaaaacggatcagcgccaccagaatgtgctgcaggccgaacggcagcagcaagcgttcgccggtgccgaacagcatcgggccaaaggcgccggcgctgttgatcacccagcccagcccggtgatgccggcggcgaaccacggccagatcagtgggatcaccaggccgcacaggcccagcaccacggtggtgacgattggcacgaagcgcgtgccgccgaaaaacgccagcgcgtccggcaggcggatggtgtggaagcgttcatgcaggcgatagacgatgatgccgacgatcaccgcgccgaggatgccggtatcgatcgactgaatgccgagaatgttctggatattgttggctttcagcaccagcggatcgctggtgggcagcacgccggcggcggtcaggtagaagttggtgcccagattcagcacagcgaagccgacgaaaccggagaacgcggcgacgcctttgttttcgcgcgccatgcccagcggaatggcgatggcgaacatcaccggcaggaagctgaaggcgaaggagcctaccttgctcatccaggtgaagatcagctggaagatcgggtggccgataaacggcatcagggtgatcacgtcgcggctgctcagcgagctgccgatccccagcatgatgccgcagaaagagagcaaggcgacgggcaacatgaacgttttgcccaggctctggaagaactcccagagggtgattttgggtttgttggctgctgacataaccgacttctcctggcgaaaagacgagcaaaaaggggactgctgattaggtaaaaagaagataaaacgttttacctagcaaaaatgcgccaccaatcacaaatctgccgcccggtttttggcgacaatgcggctggcagtaaaacgttttactgagttaacggattcggtatacccttgatcattacggcgcgggttgcccaggaacgggttcgcagagactatgagcatcaaaaaaatcaccatcaccgatgtggcgcagcaggcgggcgtgtcggtcaccacggtttccctggtgttgagcggtaaggggcggatttcgccgaccaccgtcgagaaggtcaatcaggcgatagagcagctgggctacgtgcgcaatcgtcaggcggcgacgctgcgcggcggtgaatctggggtgatcggcctcgttctgcgcgacatttgcgaacccttctatgccgaaatgaccgccgggctgagcgaagcgctggaggcgcacgacaaactgctgtttttaacccagagcgggcgcgacggccagggcttgcagcgggcgtttgacgcgctgctggcgcagggcgtcgacggtatcgtgctggccggcggcattcgcgcggcggctgggttgaaggagaaggcggccgagcagggcgtaccgctggtctgcgtggcgcgctccagcggtctcgatggggtggacgtggtgcggccggacaacatgcaggccgccaaactggccaccgaatttttgatcaaacgcggccacagccaaatcgcctaccttggcggccagagcgactcattgacgcgtgccgagcggttgggcggcttttgcgccacgctggtgcagtacggcctgccgtttcgcagcgaatggatcgtcgagtgcgattgccggcagcgtgaggcggcgcaagcggcggaacagctgctgcgccactatccgaacattaccgctgtcgtttgccacaaggcttcggtggcgcttggcgcctattttggcctgacgcgcagcggccgcagcatcggctcggatggggttgacgcttactacgggcggcaggtggcgctgatcggcttcggcgacgtgccggaggccgagctgaccgagccgccgctgaccttcgtctccagctcggcgcgggaagtggggcgcagcgccgccgcgcgcctgctgcagcgcatcggtgacgccgacctgccggcgcagaacgtcattctgccgccgacgctgatccggcgcggctccgcctaatcccgccgcagttcctcttccgcctcccggcggatccagccgataaaggttttcatcgccggcgtcaggtcccgcgacttcaaatgggtcagccaataggcgccaagcgcggcctcggcggcgaacggccgctgcagcacgccggcggccagttcgcggcggaacatgctgatcggcgccagcgccacaccgtcgcactggatcgcgccttccaccatcagtcttgacgagtcgaacaccgggccgttgatccgccacggcgtcacctgcgcagccgtgaaccagcgctcccattcatccttgcggtaggtgcgcatcagctgctcgtgctgcagatcctgcggcgtgcgcaggcgcgcggcgaccgccggcgggcagagcaccgtcagcggcgcgtcgaacagcttgatattgcaggtggcgggccagaggccttcgccgaagcggatggcgaaatccatgccgtcggccgacagattgaccaggttgttgtgggtcagcacccgtagatcgataaacgggtgcgccgtgcggaacgccgccagcctcggcatcagccagccgacggcgaaggtgccgaccaccgccaccgtcagcacctcgtggaaatgcccgccttcgaactgttgcagcaccgcctcgatgcggtcgaaggcgtcgttcaacaccggcagcagcgcctggccttcttcggtcagatccaggccgcgcggcaggcggcggaacagctgaatgcccagctgttcttccagcatgcgcacctgctggctgacggcggcctgggtgacgcgcagctccaggccggcgcgggtgaagttcaggtggcgggcggaggattcgaacgcccgcagggcattgaggggaagtcgattgcgcatcgtcgatagccataagtttttctttatgctggctgaaattattatcgcttgtcaacccggcggcaaaatccgatatttggcgcggctgctgagagcgtcgcggcagccgtaaaggaatgacaccatcaaccagggaaagcgccgtgcataacgccaataaaaacttttggccgcggccgatgccctgcaacctgagagcttctatcatgacgaaaatgaaccgcctggcggccgcgttgatcaccgcgctgatcctgccgaccgcacaggccgcgcagcagcaggatatcgacgccgttattcagccgctgatgaaaaaatatggcgtgccgggcatggcgatcgccgtgtcggttgacggcaaacagcagatttacccgtatggcgtggcctcgaagcagaccggcaaaccgatcaccgagcagacgctgttcgaagtgggctcgctgagcaaaaccttcaccgcgacgctggcggtctatgcgcagcagcagggtaagctgtcgttcaacgatccggccagccgctatctgcccgagctgcgcggcagcgccttcgacggcgtcagcctgctgaatctggcgacgcatacctccggcctgccgctgttcgtgccggacgacgtgaccgacaacgcccaactgatggcctactaccgggcctggcagccgaaacacccggcgggcagctaccgcgtctattccaatctcggtatcggcatgctgggcatgatcgccgccaaaagcctcgaccagccgtttatccaggcgatggaacaggggatgttgccggcgttgggcatgagccacacctacgttcaggtgccggcggcgcagatggccaactatgcgcagggttacaacaaggacgataagccggtgcgggtcaatcccggcccgctggacgccgagtcttacggcatcaagtccaacgctcgcgatctgattcgctatctggacgccaacctgcagcaggtgaaggtcgcacagccgtggcgcgacgcgctggccgggacgcacgtcggctattataaggcgggcgcgttcacgcaggatctgatgtgggagaactacccgtatccggtgaaactgtcgcgtttgatcgagggcaacaacgccgggatgatcatgaatggcacgccggctaccgccatcacgccgccgcagccggaattgcgcgccggctggtataacaaaaccggctctaccggcggtttctccacctacgcggtgttcatcccggcgaagaatatcgccgtggtgatgctggccaacaaatggttcccgaacgacgatcgggtcgaggcgacttatcgcatcatccaggcgctggagaagcgctgacaatcaggggcgccggcggggcgcccctaccaccgatgctgccgttcacgttgctcgcgcatgaaatcgataaaggcgcgcagtttgagcggcagatgtctgccggcggggaagtagatgaaaaatcccgatgcttcgctggcgtaacccggcagcacttccaccagttgcccctgtgccagctcctgcaacaccgtgccctgaaaacgctgtgcgatacccagccccgccaatgccgcatccttgatcagcctgtcttcgttaaaaatcaaactgccgctgacgtccagcgcgcgttcatcgtcgcccaggctgaaataccagggttccagtttgccgctgccgggaaaacggtagcgcaggcaatggtgcgcgagcagatcgtccggcgtggccggcgcgccgcaacgcgccagatagtcaggcgaagcgaccagcacccggcgctggccgttatcgatcggcacggcgatcatgtccttttgcagcatggcgtgcatgcgaatgccggcatcgaaactgcccagcaccagatcggaaaagcggtcttcggtaaacagctccagctgcacctcgggatagcgccgctgaaacgccgccagatgcggcattaccagcagcgaagcggccagctgcggcagcgtaatgcgcagcaggcctgccggctgtgcgcccagggcgcgcacatcgtccgctgccacatcgatctggcccatggccggcgacaccttctgatagaacaaccggccttcgtcgctgaggcgcaccgagcggctggggcggggaaataaccgcactcccagctgattctccagcgcctgaatgttttgcgacaccgccggcggcgtgacgcccagttggctggccgcgcgggtaaagttgcccaggcgtgccacggcttcgaaatagggcagcagttgcaggagtgaactcatctatcaataacctgtgcttaatgattcattaagttatgccttattttaatttatgaagaacgttttagactggttttactttccctcagagagattaaaatcatgtcggcaatacaacaggcgttaacagaacggatcgcggcgatcgatcaacaggcgatggccgaagggcgcatcgtcggcagcgtggtgctggtggcgcggcggggcgaaatttgctacgccggggcggccggctatgccgatcgcgaagcgcggcaaccgatgcggcgggaaacgcagtttcggctgtcgtcggtttccaaaccctataccacgctggcggcgttgcgtttgattgagcaaggcaagctgagcctggacgatgcggtcagcgactggctgccgtggtttaccccggcactggcggacggccggcgcccgacgatcaagatccgtcatttgctgagccataccgccgggctggactatcggctgaaccaaccgccggcgggcgtttaccatcagttggggatccaggacggcgtggagctgtcgacgctgacgctggagcaaaacctgcggctgttggcgcaggcgccgttgctgtcggcgccgggggagcgcttcaattattcgctggcgatcgatgtgcttggcgcggtgctggagcgggtgacgggcatgtcgctgccgcaactgtttgtcgaatgggtggcgcagccgctggggcttggcaacaccgcattccatgcgacggacgccgcgaacctggcgacgccgtattacaacaccccgcaagggccactgcgcatgtatgaaggcctgcgggtggcgctgccggaggagatggcggggggcgaggtgctgttttcacccgcgcgggcgcttaatgcggaggcttatccctccggcggcgcgggcatggtcggcgatgccgacgacgtgctgaagctggtggaagcgctgcgcagcggcgggcagggcatgttgcagccggacacggtggcgttgctgcgcagtccgcacgtcggcgcgcaggcgcaaacgcaagggccgggctggggcttcggctttggcggcgcgctgctggtggatccagacgccgcgcagacgccgcagcacgccggcacgctgacctggggcggcgtttacggccacagctggttctttgatccacaggcgcagctgagcgtggtgatactgaccaacaccgcgtttgaaggcatgtgcggccgctacccgcagcagatccgcgatgcggtttatgcggcgtaaataaaaagggccccgcagggggcccttgttaggttttcaggctattactgcgccggtgccggagcgggttccgcttcctgagccggttcagcgtcttccgccggggcgcccagcatggcgaactggccgatgaactcttgcagcgacatcttgttgccgttcaggtcaacctgattgtcagcgtagtggaacttgctcgcgatcacgccgtctttctgggtggtcagcttgaacatctgacccatggccgccaggccctgcacttgctgctgcgccagtttctgcgcgtcttccgcattatagccctgcaacaaggcggtcttcgcggtcacttcggtagccatcgcttccggaatggtcaggctgagatccagctttttaaccgcctgcgcgatcaactgatccggcgattgtgccggggaggcggccttgctcggatcggtcatcgccagatccagcgtgaagacgctctcacccttgctgtttttccagctcagcggggcgatgctgaggctcgggttgcctttcagcagcagcggcaggttcttttgcagcatctcggaggtctgctgttcgtagacgtccggatccaggttctcgccctgctgcagcagcgccatggtttggcggttgtagctgtcggagaagtctttcagcgccttgccgtcgacgttgtcgattttcagcgtcagtttaccggcaccgaagtcgttgccctgcaccttgagcgcgtccatggtgtagtcgatctggccaccgatattgctgctgccttgctcgccaaacttgctcaccagattgaaaccgtccaacgccacggtatctttaccgtcgatcgtcagtttgaactgcttcagcgtcatcgtctgatcgccgagcttcacgccgaacttgctttcgttgctgttgcctttcaggttgaagccctggaaggtgatctgctcgttttggccgaattcgttcgggctggcgaacacgatagtgtcgctattggcgtccagcgcgaattttttcagatcgcgggacacatcggcgtcaatggtggcgccgctgaatttcagcgaagatttatccttctggtagtccagtgggataaagtcgatggtggacgcggtatcgccgctgtacgagatgcgcgaatcggcggtaaacagcgatttgcctttggtggtttcaaacaggcctttcaccgccggggtgttttccagctcggtatgcaccgacgccatgctcggcagcaggttgaattttttcagctgcgcgaacgggaacggaccgtgatcgatggtttccaggaacgccacttcttcaccggctttcagcgccgcattttcactggtatccgtgccgtcggaacgcagcacataacgcactttactgctgaacaggccgcgctggtaattttcatagctcagcttgacgccggctttcggcaggtaggctttcagttggccgttggcgttgtcgacgacttcgcccatgtgctgctcgatctgtttcccggtgtaccaggatgccccggtccatgctgcgccaagaacgacaatgacgctgacagcgactaacgattttttcatagctctgtttcatcctttttttcttatcaccctccgttgcatgggaggggcaaataggggccgacaaaaaacgcccgcaggcgtttaattgtgggggtagctctcgctttcagcaagcaatttgctgaaatttatcaacggttaggccagctggttataaacccgggcgatgcggccgctgccgctgacgttgaccggggattcgaacgccccgataaagcaggactcgcccggtttgagcgtcaggcgttgcccggatttctccagcgtcgcttcgccggcgacgcagaacacgatggcggcgcttcgctgtgccagcgcctgtggtgcggcggtcaaatcgtgcagtgagaaggcgaaatcctccaccgggatcgggaagaacagctcgttgccgcgttgctccggttgggtcagcaggccggaagccggttgcgggcggaactgcaggttggccagcagctcgggcacgtcgatgaatttcggcgtcaggcccgcgcgcagcacgttatccgagttggccatcacctccagcgccacgcctttcaggtaggcgtgcggcgtttcggcatacaggaacatcgcctcgcccggcgcgagctgcaccacgttcagcagcagcggtgagaacagaccgctgtcgtccggatagaagccggcgataaagcgcacggtatcccagggttccccctgctggttgttgagcgcggctttcagcacgccgagcgccagcgatttttgttcgccactcatcgtcaacaggctggcgaacagggtcgcgaggtgcgcggtgtccggctgttgcaggaaggcggcgatgtcgtggtgcgcgcccgcgatcggttgcagcagggaaacgatatcggccagttcgcgaaagccgttcatcgccaggaacggcgtcagggcgaacaccagctcgggcttgtggttgggatctttatagttgcgttcggcggcgctcagcgggatgccggcggcattctctttcgcgaagccgatctcggccgccgctttactcgggtgaacctggatcgacagcggctgatcggcgcacagcactttaaacaggaacggcaactcgccaaaacggctggcgacgtcggcgcccagctgttttggctggtcttcatcgataagaaagcgcagcgaacgcagttcgccgtcggcgcccggcacgcgggaagggctcttgggatgggcgcccatccacagttcggccatcggctgattatccgggttggcgatgccgtaaagacgggtcagcgcatcgtggctgccccaggcgtaattctgtaccgcgttggtcattttttgcatgtcgataaacgtccttaacgtcattgtcgcactggatgacaataacctactgattttatacggttaactaaatctgtgccgacgactatcctacgcccgcgtcggcaggaaaaatcatgggcgcgatcaaaaaaacgccggataacgtcgcgcccggcaatggggccatagtataacgtgataacgatcggcgtctcaattggcgcgcaggtcccaaggcgacccggaaaacccgccgatcgattattatttggcccaacggggattattgcctttagcctggtcattcaacgtcattatttattttttcagcatgtcaaactatgtcggctgaatttattttttaccgtctgagccattcccttattattattctcgcgctgcaccgggctatcacacgctgagcttaaacctgggcgtcagacccctttaccgtaacggctaacacgtcgatttaacgaaacaagaggtctgttgcatgaaaacactgttgttgctgttggggttttgcaccggcgcagcccaggcggcggtgattgtcgcctatccctacgcggcgccgcgcgccgtggtgatcgcgccggcgccgatcgtcgtcacacccgccccggtcgcggttcccgccgcgatagcgcctgtggcgcatccgctggcactcaccgccggtgcggcggtgaccggggcgtatcggcatcatgaacggcaggacgcctacgacgagatcaatcatctgcagcagcaacggatcgatgaactcaatcatttacaggcgcagcgcatcaataattttaatgcgcgtcatccgcgttaatggttatccagatttttattctccaggctcattcccggccgtttatttcaccgcgggttaaccggcggaaaataaccgcgtcgttaatgggtaaaagagatgaaacgtgctgtgagataactctcttaatgcgaatagttattatgtcactatactgggagtgcatgccgacgtgggggggagcgcgtcggcctaaccctacaattttaggaattatgctaaggagatcgtgatggcaggcgttcgtatcgaaaaagactctatgggccccatcgaagtaccggccgacaagctgtggggcgcgcaaacccagcgttcgttggcgcatttccgtatttcctccgaaaagatgccgaccgcgctgatccacgcgctggcgttgaccaagcgcgccgccgcgcaggtgaacgtggatctggggctgctgccggccgaacggggcgccgccatcatcaacgccgccgacgaagtgctggcggacagccatgccgaccagttcccgttatcaatctggcaaaccggctccggcacccagaccaacatgaacatgaacgaagtgttggccaaccgcgccagcgagctgctgggcggcgtgcgcggtgaagagcgcaaggtgcacccgaacgacgacgtcaataaaagccagagctccaacgatgtgtttcccaccgcgatgcacgtggcggcggtgattgcgctgcgcgaacacctgatccccgagctgaaagtgctgcacaagacgctgagcgacaaggccgaagcctaccgcgatatcgtcaaaatcggccgcacccatctgcaggacgccacgccgctgaccctggggcaagagatatccggttgggcggcgatgctggcgcacaatctgaaacacatcgaggacagtatcccgcacattgccgagctggcgctgggcggcacggcggtcggcaccggcctgaatacccatccggagtacgcggtgcgcgtcgctaaagcgctggcggagttgacccatcagccgttcgtcaccgcgccgaacaagttcgaagcgctggcgacctgcgatgcgctggtgcaagggcatggcgcgctgaaagggctggcggcttcgctgatgaagatcgccaacgacgtgcgttggttggcgtccggcccgcgctgcggcattggtgagatttcgatcccggagaacgagccgggcagctccattatgccgggcaaggtcaacccgacccagtgcgaagcgatgaccatgctgtgcgctcaggtgctgggtaacgacgtggcggtgaacattggcggcgcttccggcaacttcgagttgaacgtgttccgcccgatggtgatccacaactacctgcagtcgattcgcctgctggccgacggcatgcagggctttaacgagcactgcgcggtgggcatcgaaccgaaccgcgatcgcatctcccaattgctgaacgaatcgctgatgctggtgacggcgctcaatacccatatcggttatgacaaggcggcggaaatcgccaagaaagcgcacaaggaagggctgacgctgaaagccgcggcgctgaagctcggctacctgaccgaagcgcagttcgacgagtgggtgcggccggaagcgatggtcggcagcatgcagaaataatgacgtcatgcctaaatggggcgcggttgcgccccgtcttttcaagccaacatctctagcaccgataacagcgcctgcggctccggccgctgggtgtaatcggcgtgcgcttcggcgtagacaatacggccatcgcgggcgatgacgaatcgcgccggcagcggcagcgtccagctgtcatcctggttgaactgcgccagatcgaggccgagccgctgttgatacagggcgatcagcgcgtccggcaggcggtaacgcaggccgaactgggccgccagacggttgcctgtatcgctgagcaacggaaaagtgagatcgtgaccgcgcgcggcctggcggttatgcaccgcgctctgcggcgaaacggccaacaactgcgcgccgtactgcgtgatggcgggcaatgcggcctgcagcgcctgcagatcgagcgtacagtaagggcaccagatcccgcgatagaaactgacgaccagcggcccttttgccaacagcgccgtggaagagcatggtcggttttcgctgtccgacagtgtaaagccgggcgcggcgtcgccgaccttcagggcgcgttcggccacgcccgacgcgatctgcgcctggatcgcctcacgcatcagcgcgtgatcttgcaccgcgagtttgaacggcagttggtcggcctcgaatgccgctttgaaggcatcgagtttgtcttgcagtgtcatgcgttctcctgacgggaatgagggggagcgcttatcttgcccattccaaaatggcgcgtgtagactgcaacaaatgctaacagttattccaacaaggaatgccatgggtaaatttgccgattacgaaacctatgcctgcgtttacgagagcggctcctttaccgcggcggcgcggcggctgcacgtggggcagccggcggtctcaaaagcggtggcgcggctggaacagcagctcggcacgcgcctgatgctgcgctcgacccacggcctgcagccgacggatgcgggacagcagctgtatcaacgcacccggcgtatcctgaacgagctggcggagacggaagcgctggtgcagagcgccggcgagaccctgagcggccggttgcgggtcgcttcggcggcggtgttcgcccgcatcgttcccttgcctgatttgacggcgtttatgcgcgccaatccacggttgcacgttgatttgctgctggatgacggcaatctgtcgctgattgaagaaggcatcgatattgccctgtgtgttggcgagttggaggattccggttttaccgcccgcaagctgggtgaggtaaagcaatgcgtgatcggcacgcccggctattttgccgctgccggtatgccgcagcggccggaagatctgttgcagcacgagatggtgatttaccatcgccgtggcggcggcgagcagtggcgcttcagccgcggagaagagcagcgcgcgctgcggttgccggggcgcatgcgggttaacgcggcggagtgcgtgcgcgagttggtgctggcgggctttggcgccaccgtcgccagcgaaggcctgtttcgcagcgagctgcaaagcggggcggcgattgcggctttagcggactggcaactgccgccgctggcgctgtgggcggtgttccccggtggccatttcgtctcggccaaggcgcgggcctttgccgattttgtccaaaccgcgctatgcagggagccgtgatatgtcgcgcgcacaacgtttactcgatctgatgcagctgctgcgcaaccaccgttatccggtggcgggccatgcgctggcgcagacgctgggcatcagcatgcgcaccctgtaccgcgatatcgccacgctgcagcagcagggggcggaaatcgccggtgaggcgggcgtcggctatgtgctgcgccccggctttatgctgccgccgctgatgttctcgccggcggagacagaagcgctggtgctggggatgcgctgggtcagccgccgcggtgacagccaactggcgagcgcggcgggtcaggcgctggccaagatcgccgcggtgctgccgccggcgctgcgggaggagctggaggccaatacgctgcttatcgcgccggttcaggcgccgccggtggcggatgagatgcgggtgctgatccgagacaccatccgctgcgagcgcaaactgcatatcgactacctcgatctggcggggcagcgcagcgaacgcctgctgtggccctttgcgctgggttttttcgatcagtttcagatgttggtcgcctggtgcgagctgcgtcaggcctttcgccattttcgtctcgatcgcattcaggccgccacgccgcttgcacagcgctatccgcgtggccggcggcggctgctgaaagagtggcgcctcagcgagggcattgcggagcaatagcggcacgctgctgccataaactgtcagtcgcgcgccttagtctgtgcctatcgggaaccggccggttcccatcacccaaaggacagaccgatgacccttcccagcatgaccctgctttacgtcgacaacccgctcaacagcgccgccttttatcaacgcctgctggggcaggcgccggtggagctttcgcccggctttgccctgttcgtgctcaacaacggcttcaagctggggatgtgggccaaacagggggtaaaacccgccgccacgctgaccgggggcggcggtgaactgggctttttatgccaggatccgcaagaagtggaggcgcgctataaccagtggcgcgaacttgggctgactatcgagcaaacgccgaccgagatggagttcggttacaccttcgtggcgcgagatccggacggccatcgcctgcgggtgtatgccctcagcgagtagcgtcgtcggtatacaggtgcagacgcggcaccagcagccgcagcggcctggcgtcgggtttgtaacggtgtttcaccgcctcggcgtcgtagttgagcagttcgccgatcttcggcaccgcggcgccgctttcaacctgacacagggcgatcagcggtagcgggcaggggtgctgcacctgtttttgctgctgctgataccacacccgggcgatcggctgcacttttaccggccgtttgatcttcagcgtcgcctgctgcggcagccggctgacgtcgtcgatttcacggctgaccagtgcggcccactgttcacggctgtgcggcggcaccgcgcggccggctttcaggcttttctccagctgcgccagaatgtcgtcccgcttgacgtttttgatgatgtgcttgttggcccagccgaagcgcacggagtcgggattggtcagggcggtgagggtgcgataggcgctgagggtaatcagcccgtgcagatgggtgtgcacgaactcgaaacgctgctccggcgccaggccggaatcgacggtgataatctgctccagttcgcccttcaggcggttgatcagcgccagctgcgtttgcagcgcctgatactccggttgctccaccgccagacagatgacgccgggcaggcgcacggcggccttgctgctgacattctcccggttgtggtgaatgaacagccgctgataatgctccagcgccagatcgcgcgccgcttgccccacatgctgctcgaccgcgatatgcgaaatggcctgatgttcctggcctttttcaacctccggcaggctgaacacccgcgccgccagcaaccgcagcggggcgatctgctgctgcaacgcgccgagcgcctgctccagctcgttaaagcaggcgttcattcggccaatcacatcgtatctgctcatcgcacacccccatattagttacaacatactatagaagagtggccgactgggggcaacataggcaaacgaagagggagcggcttcactggccacccggcttgtcagcgaaaaatacgccagagggacttctacagcagggcgcgaaatagactttgcattggtatgggtttgattcattgatggattttttctgttggttgatattttgtttgatccattttccgtttgccgttgtccaattgctggaacaaacagaatggcaggacgctatgagcccctcgggttatcttttcttctgtcattaacgggtgctttaaacggaggtttactgtggatattaaacagaaagtcaaaaacatgacgctggaagagaagatcgggcaaaaaatcatgctggattttcgctactgggatcagaacggtagcggcaatcaggatatgaccgttcccgatgcagccattggcaagctgatcaccgataaccacatcggtggggtgatcctgtttgccaataatctgaaagacaagcagcagatcaaaacgttgacggcctggtatgccgcgctgaaaacccacgcgggcgttcgtttgtttattggcacggataacgaaggcggtaacgttttccggctgccgcgtggcgactacgcctcattccccggcaatatggcgctggcggcggcgatcgagggcggtgcggataaacagctcgccgttgaacagggcaaactgatggcccaggatatgcgcgcgttgcatatcaataccaactttgccccggtcgtggacgtcaacaccaacccgttcaacccggtgattaacgttcgcgccttcagcgatgataagaacaccgttgcccgcctggcggaaaacatggtggcgggcatgaaacagcaggggctgatcaccgcgtacaaacacttccccggccatggcagcacctccaccgactcgcataccggtttgccgcgcgtcgatcgtacgcgggaagaagcttttgccattgatatcgccccttataaacaggccatcgatcgctgcgcggcgccggatatggtgatgactgcgcatattcagtaccccgcactggataacagccagatcgacacccgcaacggtgaaaaaatcacggtgccggccaccatgtcgcgcgaaatccagacccagatcctgcgcaatgagctgggttatgccggcgtaacgatttcagacgcgctggatatgggcgcgattgccgagcatttcagccagcaagcggcggctgaaaacgtctttaccgccggagtggatatcgccctgatgcctgtcagcatcgcctcgccggcgcaggcgagcctgctgcccgagcttatccgctacattgcgcagcgggtgaaaaccgggcatctcagcgaggccgatatcgatgcttcggtcgagcgcattttgcgcctcaaattgcgccatcacctgatgggccatagcgataaaccctgttcccacgacgtttcgtcctccgcgcatcagctagagaaacggattgccgatcgttccattaccgtggttatcaaccgtcaatgtctgctgccgttaaaggacaaagcgctgcgctactttattctgactccgtggggcgagcaggccaaaggcattgcgaacgtgatggcgcaggagggctatcagaacgtcgtggccgcgaaggaaacggaactgagcgacgcccaggtcagggaacatattgccggctgcgacgtgttcttgcttggaaccctctcaacccgctttacgcctgccgagcaggatggggtcgtgaccgccgcaaccggggcggctaatgacagcagtccttatccgggctggctgaaatacgccgccgagcaggggaaaaaatgcgttcacctctcattgcgcgcgccttacgatatcgtgaactatgccgctgacgtggatgcggctgtcgccacctattcttactacgggtatgacagcggcgtatggcgtggcccttcgatgatatcgctggcacaggtgctgacggggaaaatcagaccgcacggaaaactgccggttaatacctggcatgactacgatgagcaaaccaataccggcaaggtggcgttccctcgcgggacggggctgagctggtgatgggataaggagaggcgtcgccagaaagggcggcgccggtcgctggatggcgttgataaagcgggcggtttcttgctccgcacgccgcgacatgggataaccgtcactcacggaaggagaacatttatgccgacaggcgcaacaaaactaggcggatggctgttgatggccgccatgctgggcgtgagcggatgcgccaaaccccctgagccggaaaagcctccgcagcctgtaccgccggcaacgccgatgcggggcatctggctggccacggtcattggcttggactggccgccggcggcctcgctgaaagcggaatccacgcaagagcgggtgcgtctgcagaagcaggggctgacggacgcgctggacgacatggtgaaaaccgggattaacacggtgtattttcaggttaaaccggacggcacggccctgtggcgttctgacatcttgccctggtcggaggtattgaccggcaccgtgggccaggaccccggttatgatccgctggcctttatgctgacagaagcgcaccgacgcggcatcaaagtgcatgcctggctgaacccttatcgggtttccatgaatacccgacagcaaacgattgatgcactcaatcatacgctgcagtcgccgccggccagcgtctatgcgctacatcccgactggatacgcaccgccagcgatcgcttcgtgctcgaccccggcctgcccgaggtgcgcaactggatcaccggcgtggtggctgaagtcgtcaaaaactacgatgtcgacggcattcagtttgacgattatttctattacgaaacgccgcaatcgccgctggatgatgaaaagacgtatcgcgcatacggcaaagggtttgcagacaaggccgactggcgaagagacaacacgctgcaattgataaaacaggtttccgccaccgtcaaagcactgaagcccgcggtcgcgtttggcgtcagcccggcgggcgtatggcgaaacaaagcggacgatcctgccggttcggcgacgcgggccggcgcgccgtcgtacgatacggcctatgccgatacgcgccagtgggtcaaactggggctgctcgactatatcgcaccgcagctgtattggcctttcgatcgtgaaattgttcgctacgacgtgctggccaactggtgggccgaggtggtgaaagacacgccggttcggctctatgccggggtggcgctgtataaagtgggcacgccatcggccagcgagccggcctggaccgtcgacggcggcgtccccgagctgaaaaggcagttggatctcaacgagagcctgccggggatggggggaaccatcctgttccggcaacgttatctgaccgagccgcaaacggacaaggcggtggagtacctgcaaactcgctggaaacccggtcaataatcacgggctctggcatgacgagccgcggctaaccaccgcggctttttccattcacaggcgcgccgcttccggcagccgtttcaggtaatgcaccaccagcagcgccagcaatagcatcaggctgataaacgccgccacgccattccagccgaagctgtgccagaacacgccgcccagggtgccggccacgctggagccgacgtaatagcagaacagatacagcgacgacgcctggcctttggcgcggcgcgcacggcggccgatccagctgctggccaccgagtgggcggcgaagaaaccggcggtgaacagcatcatgccgataaagatcgccggcacctgcggcagcgcggtaatcaggatcccgatcagcataatcacgatcgacgccagcagcaccgggccgcgcccgaagcgcgaggtgagcgcgccggccttgggcgaactgtaggagccggtgaggtacaccaccgacagcaggccgacgatcgcctggctcaggtgataaggatccgccagcaggcgataaccgatgtagttgaacagggtgacgaagctgcccatcagcaggaaaccttccgcgaacagcagcggcaatcctttatcgtgccaatgcagtttgaagttgatcagcagggtgcgcgggcgcagcgagctggcgcggaaatgccgcgaggcgggcaggatgcgccagaacatgcaggcggcggcgagggcgaacaggccgatgacgccaagcgatacgcgccaggagaagaagtcggtcagcaccccggtcaccaggcggccgctcatgccgccgatcgagttgccgctgatatacagccccatcgagaaggcgacgaagctggggtggatctcttcgctgaggtaggtcatgccgaccgcggcgacgccgctcagcgacaggccgatcaatgcgcgcatcagtaaaatgccgtgccagctggtcataaaggcgcaaatcaacgtgcaaaccgccgccagcagcagcgccaccaccatcaccgacttgcggccgatggcgtcggacagcggcccggtaaacatcaggccgatcgccagcaggccggtggagaccgagagcgacaggctgctttccgccggcgagacgccgaagtcttgcgacagcaccggcaggatcggctgcacgcagtaaagcaacgcgaaggtcgccagcccggcggaaaacagcgccagcgtgacgcgcataaactgcggcgtgccgcgttcgatataggggagtttattgttgagggtggagcgttttactgttggcgcagcggccgcgtcatcgttggcggccagcgtcgacggcatcacggccgcagaacgcacaggggttgtcacagcgtttccttaccgaacttcggggagataaacagacactttgcagataacaaaatgatagggagcggcgaattttttgtctaatatattaataattacaattaagactttttaaatatgaatatcgagttgagacacctgcgttactttatcgccgtggccgaagagctgcattttggccgcgccgccgagcggttgcgcatctcccagccgccgctcagccagcaaattcaggcgctggaagagatggtcggcgcgcggctgctggcgcgcaacaaccgcaacgtcagtttgacccaggccggggagatgttcctcaaagaagcctatcaggtgctcgatcaggtcggccgcgcggcggaaaaggcggcgcgcctggatcgcggcgaactgggggaaatgaccatcggctttacctcttccgcgccctttatcggcgtggtggcgcgcagcctgcgcgcctttcggcagcagtccccgcaggtgcacatcaagatgcgcgaaatcaacaccaaacagcagatcgaaccgctgctgaacggcgaactggatctgggggtgatgcgcaacacgcggctgccggaagcgctgcactatcagctgctgctgcgcgaaccgctggtggcggtagtgccggaagggcatccgctggcggaaacgcccggcggcgcgctgcggtttcaacatttggcgcgggagccgttcgttttcttctcgcgcgaagtgggcaccgcgctgtacgacgaaattctgctgctgctcggcaaggccggcatcaccccgtatatcacccaggaagtgggggaagcgatgactatcatcgggctggtctccgccgggttgggagtttcgattctgccggcgtctttcgcccgggtgcgggtggacggcgtgcgctatttgccgctggcggagccggacgccaccaccgaagtgtggctggtgcaccaccgccggcggccgttgaccgcggcggcgcagtcgctgatggcgttgatgctgaaatgacgttgagcttgggcaaataaaaatcaattcacgctgaaattgcgaggaatttgtgcagcaaatcacataacgaatcaaatagttgacgctgtatgacaaaagccccaccataacccctagtctttatttagaagcgcgaaaaatagtaggagccggtttgtgattgcggttgggcagcctgggcatatcgatcaaatcaaacagaccaatgcgggggcggtttatcggctcatcgatcaactgggtccgatttcgcgcatcgaactgtcaaaacgcgcgcagctggcgcccgccagcatcaccaagatcgtgcgcgagctgctggaagcccatctggtcaaggaaaccgagtaccaggagatcggcagccggggccgcccggcggtagggctggtgctggacaccgaagcctggcactacctgtccgcccgcatcagccgcggcagcatcacgctggcgctgcgcgatctcagcagcaagctggtggtggaggaacagctgccgctggcggccgaacatcccgaaccgctgctgaagcgcatcctgaccgaagtcgatcagttctttatccgccaccaaagcaagctggaacggttaacggcgatcgccatcacgctgccgggcatgatcgatgtccagtccggcgtggtgcaccgcatgccgttttacgacgtgctggagatgccgctcggcccggcgctggaaacccgcaccggcctgccggtttacctgcagcacgacatcagcgcctggaccatggccgaggcgctgtacggcgcctcgcgcggcagccagaacgtgattcaggtggtgatcgaccacaacgtcggcgccggggtgatcaccggcggccatgtgttgcacgccggcagccacagcgtggtggagatcggccacacccaggtcgatccctacggcaaacgctgttactgcggcaaccacggctgtctcgaaaccgtggccagcattgagaacatgctggagatcgcccagcagcggctgagcggctcgatgagctccagcctgcacggcgcgccgctgaccgtcgaatcgctgtgcgacgccgcgctggcgggcgatcagctggcgcgggacatcattctcggcgtcggccacagcgtggggcgcattctggctatcatggtcaacctgttcaatcccgagaagatcctggtgggctcgccgctcaaccgcgcggcggagatcctgcacccggccatcgcctcctgcattcgccagcaggcgctgccggcctacagcgagcaggtcaaggtcgaatccacgcagttcttcaatcagggcaccatgcccggcgcggcgctggtgaaagaggcgctgtataacggttcattgctggtgcagctgctgcaaggctaacatcagaacctcttattaattccgcaaaagattgagctacctcaagcccctacgcggcagcatcccctagaatttttccgaaagacttcttcgccgccggtgcggcgatacattgttaacggggcattctggggcattttattcatgttgaagcgtttatttgtgacaggcacggataccgacgtcggtaaaaccgtggtttcccgcgggttgatgcaggcgctggccgccgaaggccgttcggtggccggctacaagccgatcgccgcacgctgccaggaaaccagcgagggcatccgcaataaagacgctttggtattgcaggcatcttcaaccctgccgctgtcctacgaggagatcaatcccatcacctgcctggatgaggtgtttcatgcgcatgcgaccgaggacatcaactatggcgtgatgagcagcggtctgcgggatctgtcggccaaagccgatacggtggtggtggaaggcagcggcggttggcgggtgctgatgaacgatctgcggccttacgccgagtgggtggtgcaggaacagctgccggtggtgctggtggtgggcatcaagctgggctgcgtcagccacgcgttgctgaccgcacagtcgattatcaacgacggcctgccgttgctgggctgggtcgccaaccgcatcaacccggggttggcgcactatgccgaaaccatcgcggcgctgcagcagcgcatttctgcgccgctgctgggtgaaattccgtacctgccgcgcgcggagcagcgcgaactggcgcactacctcgacatctccacgctgctgcgctagcgcgctcaggccaggaaaggggccaacaaacgggcggagacaaacagccccaggccgtacaccgtatgcaccagcaggctgatgatgcggctacgcgtcggattgggggtgttcgccgccgccacgccaaagcccaacgccggctgcatcacgaagaagggcgccgccaggctcagccagccgctcaacagcgcgaccagcggcgtcggcgcggcgtaccacgcgatgcccgccaagccgagcgggataaaggcgaaggcgacgccgatcgcgtagtgcagcagccatcccatcgctttttctccccgccgcaccggcgcagccatgatcggagcgtgataaaaccggccgtcgaacaggccgataaaccagcggccgaccagcgcgtagttaaggggcgggatgcccagcacgcgcttttgcacgatggcccacagatcggtgcacagcgtggcgcccaccccggtaagcagaatcatcagtaaaatttctgtcgtcattttcgtgtccttaaagtcactcatggtgtaatgtgcgcacagtgtgcaacttaaagtcgacttcaagtcaatggaaaaagaactggatattggcgaggtggcgcgtttgagcggcatcgcgccctcggcgctgcggcattacgagaaaaaggggctgatcgcctcgataggccgcaacggtttacgtcgccaatacgccgccggcgtgctggatcaactgaagctgatcgcccttgggcggctggcgggatttacgctggatgagatcgcctcgctgtttgacgatcgagggcgcatcgccctcgatcgccggctgctggcggcgcggattgaagaactggatcgcaccctgcggcgtctggggcaggtgcgcgccggtttgcagcacatggtcgattgccctgaaccggagcacctgcagtgcccgcagttcaggaagctgctgcagcagggcgagttttaagcctcgcgtttgggcggcggcgcggtgtggtagaccgataccggccgcaggccgcgcgacacggtggtggcgatcacgcaggccagcagaatgccgggcagcagcgcgtattcgccggtcatttcaaacaccatcagcgccgccatgatcggcgcatgggtggtggcggccagcagggtagccatgccggtcagcgccagcagcagcggcaccgccgcatccatccccggccacaggccgaacagctggccgatcatcgaaccgagcgcggcgccgacgaacagcgtcggggtgaagaccccgccgggcgcgcccgacccgctgctggcgaggatcgccaacagcttgcataccaggatcgcccccagcagcaacacccccggcggcgcgatcagcagcgcctgcaccacgctgtagccattgccccatacctgcgggaacaacagcgaaagcagcccaacgatcaggccgcccagcgccagctgcagcggcggcttcaggcgaagcgatcggaacgcgcggccggtggcggtcatcaaccataaaaacagcggcccgccggcgccggccaccacgccgaccagcgccatcagcaggtattgcgtcggcaagggggcggcgagcggcgtcaccaggtagagcggcgcctggccgccgttgagcaggttggtcatcagcagggcgctgaccgcggcgatcaccaccgggccgagcgaggccagcatcagggtgccgaacaggatctcggcgataaacaggctgcccgccagcggcgcatgataggcgctggccatcccggcggcggcggcgcaggccacccacagtttccattctttctcgtgcgtaaagcgctgggcaaacagcgagcccaccagcgctgccagcaggatcatcgcgccttcacggccgatggcgctgccgctcgacaccaccagcagcgacgccagacacttcaccaggctggcgctggtgtccagcttgccgttgccggtctcgatcgcttccatatagtcggtgggcgccgccgggcgctggtggcggtagcgctggtgaacatacagcagcaggcccgccgccagcccgcccaacgcaggcgtcagggcgcgccgccagccgggcagcgcggcggcggcggccaccagactgccgtcggcattgccgagcaacagccactcgaggccaatcatcgaacggtggaacagccacaccgccagggcggcggcgacgccgatgaacacggcgataaacaggctgcgcagcagggcgcgatagtggtgcaggtggaccaatcttttcatgcgtgggcggcgtcgtgagaaaaatcaaagggtcatcagcgcattgtgcttggcgctccggccgatgaccagtgaatctttatcaaactgcggcatgggcggggcggtcggcgccccggcgggggttattgcggcgtcagcacccggcgcgtgcggccggagctaaggtagtcagcgatataatcctgcgagatttcgccgctgtagcggccgtcttcatcgacgatcggcatccaggacgtattgtgctcatacagcttcgacagcaccacgcgcaggttctcttccgcgcgggcggtgacgcgaaagtggtgcaggctgtcggcgcatacccccggcgcaccgcgcgcctcgcggcgtttgacgtaacccagcggtttgccgtcggcgtccactaccgtcaccgaacgggcgtcgatatcgtccatcaacccgaatgcctctgtcagcggcgtttcccggcgtaccgtcaccgtctcttgttggtctgccacgtcgccggcctgcaccagcagcaggcgcttcagcgtgcgatcctggccgacaaaggaggcgacgaagtcgttcgccgggcgcgccagcagctcatcggcgctggcgttctgcacgatcttgccctggcggaacaccgcgatgcgatcgccgagcttcagcgcttcgtcgatgtcgtggctgaccagcatcacggtcttcttcagctgacgctgcatgtcgagaaactcgttctggatggtttcgcggttgatcggatccaccgcgccgaagggttcatccatcagcagcaccggcggatcggccgccagcgcacggatcacgccgatgcgctgctgctgcccgccggacatctctttcgggtagcggtgcaaaaagcgcttgggatccagcgccaccatgctcatcagctcctcggcgcgatcgtggcagcgttttttgtcccagcccagcatgcgcggcaccacggtgatgttctcctcgatggtcatgttggggaacagaccgatctgctggatgacgtagccgattttgcggcgcaggctgacggtatccagcgcgctggtgtcttcgccgttgatcagaatggtgccgccggtgggttcgatcaggcggttgatcatcttcagcgtggtggttttgccgcagccggatgggccgagcagcacgcagatttcgccttccggcacgtccagattgatgttgtcgacggcgttgaacggcgtgccgttcttttgcatgaactgtttggtcagattttccaatttaatcatgagcggatccccttgggcgtgagcgcaatttgcaagcggtgcaataaccaatcgaggacgatcgccagcaggctgatcatcacggcgccggtaatcaactggcggatgtcgctgctgctgatgccgttgagcagcagcaggccgaggccgccggcgccgatcacggcggcgatcgccatcacgccgatattcatcaccacggcggtgcggatgccgccgaaaatcaccggcagcgctaccgggatctccacccagcgcaggcgttgccagaaggtcatgccaatgccgcggccggcttcgcgcagcccgccgggcaggttgtcgagcgcggtgtgggtattgcgcacgatcggcagcagcgagtagaggaacaccgcggtgatcgccggcacgtagccgatgccgtggccaatcaatgaaaacagcgggatcatcagcccgaacagggcgatggagggcacggtcagcaccagcgtggccaggctcagcaccggcgtcgccagccatttgtggcggacgatcagcacgccaagcggcacgccgatcaggatcgccagacccacggcgacgccgaccagcagcaggtgttccagcgtcaacccggcgatataggcccagttttgccaggcgtaaagtaaggtattcatcatgcctcctaaatcaggccgcgctgcttgaggaacgcgtcggcgacctgttgcggcgtctggtagtcgatatccactctggcgttaagctcggtgatcacctgattggtgaactgtttcgacagcgtgttcagcgccgcttccagccccggcgtgttttgcaacacgtcggcgcgcaccaccggcgtgactgcatagctcgggaaatagcctttgtcgtcttccagcacctgcagatcgaagcctttcacccggccatcggtggtgtataccagcccggcgtcgacgaagccgtcgcggatggcgttgtagaccaggccgggatccatctggcggatttgcgggcgatccagcggcatgtcgtacagcgcctgcatcggcttcaggccgtccgagcggccggcaaattccagatccagccccagcagccagttgtgtttcgggtcggttttacgcacctgttccactttggccaccagctgcgacatcgtgcggatctgctctttttccgcgcgccggcgctgcatggcgaaggcataggtgttgttcatgtccgccggctgcagccacaccaggccgagtttggcgtcgagctttttcaccgtgtcgtaggtttcctgcggcgacatgcgcttattgatgtggttaaagatgatcagcgaggtgccggtgtattcccaggtcatgtcgatctgcttgttgatcatcgcgttgcgggtgatcaccgtagccagattggtcttgggttcgacctgaaaacccttggcccgcaggtattgcacggtgatcgccgacagaatgcgctgttcggtaaagttcttgctcgccagcgtcagcggggcggcccaggcggccgcgccggtcatcagcaaggagaacagcagcgcgtggcggagtcgttgtaaccatcgagtcatcgcgtttctcccatcaggatgcggtgtgcgggctgagccggcggccgagaccggccagcgccagatcgagcagcagggcgatcagcgcggtggcggcggcgccgaggatcagcgtcgggaagtcgttcaggtagatgccggggaagatcagctcgccatagctgctggcgccgatcaaaaacgccagcggcgcggtgccgacgttaatcgccatcgcgatgcgcaccccggcgaagatcaccggcagggcattgggcagttcgacctggcgcaggcgctgcccggcggtcatgccaataccgttggcggcctcgaccagcgccggcggcaccgaacgcaggccggcataggtattgcgcacgataggcagcagcgaggcgaggaacaacgccaccaccgctggccggtcgccgatgccgatgatcaccatcgccaatgccaacaccgccagcggcggcagggtgttgccgacgttaaagatctgcatcacgtgctccgcccagcggcgggcgaaagggcggctcagcaggataccgctgggaatgccgaccagcagcgacagcagcatcgaacacaccaccaggaacatgtgctgctgaccgaggtaaatcaaatcttcccggcgcgacttgagggtttcccaaccgatgccgtaaaccagcagcgcgatgacggcgataaacagcaggctcccgaggagcaggcgccggtatggcgctgacttgtgcatgatgttgcgtcctccgttgcgcggagcggccgacgagacggcgcattccgctctgattgttacccacggcccggcgggcgtggcggtacaaaacgggcgtttcgcatgaggttagcgacattgagcgaagggtgcgttcggcacagcgtgctgaacgtaggctcaatacgtgagttaatcagcataagatactgatatttaaacccgagaaagcacgaagcccaaaggcgccggctagggaaggtatagcaccctgtcgttgaccgtgccaagttttatgaacaaaatcagctgattgagtttgcccgtattggcgccgcagcccgcgtcagcgctgggatgcgggtaaagtgaaaaaaatccacggcaaaacgttacgccgtaacagttagtccaaatggtgcgattcgccgccggcaaaggcaggatgtgagggcggatagacttggcgctggcgcttgctgatatactcagggaaaataaaaacgccaggaaacctgcataacgccatgacaaataacgtttcacccgcacccattgcccaccgcccgctgatcctgatcgcctgcatgctggcgatgttcatgtcggcgatcgaagccaccatcgtcgccaccgccatgccgaccatcatcggcgatctcggcggcttctcgctgctgggctgggtgttcgcggtctatttgctggcgcaggcgatcaccattcccatctacggccggctggcggatctctacggccgcaagcgggtgtttttcttcggcgcgacgctgttcctgctgggatcggtgctgtgcggcttcgcccccgacatgtattggctgatcggcttccgcttattgcagggattgggcgccggcgccatcatgccgatcgcgtccaccatcatcggcgacatctacagcgccaccgagcggccgaaggtgatgggttacctgtcgagcgtgtggggcgtatcggcgatcatcggcccgctgctgggcgcgtttatcgtgcaacacctgccgtgggcgctggtgttctgggtcaacctgccgatcggcctgttggcgatgctcttcctctggcgctatctgccggcgcatcagcaactgcggcggcacgcgctggatctggcgggcaccgcctggttgacgctgttcgtttcggcgctgctgctggcgctgttgcagatggaaagtctcggatggtgggtggcgccgttgctggcgctggcggcggcgtcgctggcgctgctgatccgccaggagcggcgcgcggttgagccgttgttcccgctggcgctgtggcaaagccgggtgatcgtcgccggtaacatcggcgggctggtgatcggcgcggcgatgatgggcatcagcgcctttctgcccaccttcattcagggcgtgatggggggctcaccgctggaggcgggcaccacgctggcgctgatgtcgattggttggccgctggccagcacgctgagcggccgtttgatgctgatgacttcgtatcgcgccacggcgctgttgggcgcgctgctgctggtggcgggcggcctgatcctgctgatgttgcagccggacggcggtctgctgtggggccgggtggcggcgtttatggtcggcgccggcatgggattgtgcaacacgacgtttttagtgtcggtgcagaacgcggcgcattacagcattcgcggcatcgccaccgcctgtacggtgtttacccgtatggtgggctcggccatcggcaccgcgattttgggcgccacgctgaacctcaacctgcagtggcgtttgccggagattgacgatccggtgcagcggctgatggagccggcggtgcggcacagcatggggagcgaagcgctggcgcagcttatccagcaggtggcggcttcgctgcattgggtgttcctggtatcggcgttggtgtcgttgctggcgctggcggcggcgatgctgatcccggcgcgttgtcggccgcaaggcgaagaggaagaggcggagcaggcgtaaaggaaaaggaaagggcgcggctgttgcgcgccctgggtagccgatgcggcttactgcgcgttggaggtgtcctggctggtgccggtctgcgccgcgtcaccactatcgtcgccgttgttcaggcgggtataaacgatcttctgggtgtcgttttcgcagtggccgaccacctggccgcccgcttgatcggcctgatcgttaggcacgatctccagtttgaagccggactccggaacgccgttattgacgattttttgcgaaatgtccgctttcacgctttcacaggaggccagagccgccaatggggcgccggccagcaaaacagcggttaatatcagcgttttcttcatcacgtcatccttttagacaatgaacttcctgtaacaggatagcagcaacggcggccgggtttcacgcttgcccgcccgccgcaggcggattaaggattaatccgacgcccggtctggcgatccagacatttacgggtgtccggttcccagtacgcgttgacgttgttgctgtcgttgcagcggtcttcgtcatccgccgcgcgatcggccttgtcgaactctttctcgacgcgagtgttgaccttgtggcgcagggatttggtatcattccactgctctttgctttggcgcgcttcttcggtgctcatcgcgccgctgcctttgccatcgacggtgacgcaggtgctgccctgcgtgcaggtggcggccagcgccggcgcctgccaggcgcccataacggccagcatggcgaccggcagcatcccgcgcagcagtcgttgggtcgaaaatgttttcatcgtttcatccttatgagtgagtgcgcctgatgatggcgacactggcgttacctcgcccgcaggcgtggtgataaatataccaccgcgctcctggaattcaccagccaagcgccgattcgtttactttaccgagagaaaactgcgaccgatgttaaaaaccacgctgttgtttttcgccaccgccctggctgaaattatcggctgtttcctgccttacctgtggctgaagaagcagggcagcgcctggctgctgctgccggcggcattaagcctgatgctgtttgtctggctgttgacgctgcatccggcggccagcgggcgggtctatgcggcctacggcggtgtgtatgtggcgactgcgctgctgtggctgcgggtggttgatggggtgaagctgtctgcgctggattgggtcggcgccggcgtggcgctggcgggcatgctgattatcgtttccggctggcgcgcggcctgaggaaacgcggcgggagttgcctcccgccgtcgcggctcaggcgccgcggtggatgttcagcccggcgaaggactggctgaccggcatcatttccagcgtgttgatgttgacgcgcgccggcaacgtcgcgacccagaacaccgactcggcgatgtcttccggcgtcagcgcatcggcgccttcgtaggttttgttgaccttgccgtcatcgcccttgaagcgcacgttggagaactcggtgccgcccaccaggcccggttcgatatcggtcacgcgaatgcgcgtgccgtgcagatcggcgcgcaggcccaggctgaactgtttgacgaacgctttggtggcgccgtacacgttgccgccggcgtaaggccagttggcggcggtggagccgatgttgatcacatggccgacgttgcgctcgaccatggccggcaacagcgcgcgcgtcatgttcaccagccctttggcgttggtgtcgatcatggtttcccagtcatcggcgttggccttgtgcgccggctccagccccagcgccagcccggcgttgttcaccagcacgtcgatctggcgcagctcggccggcagtgcttcgatcgcctgttgaatggcggcgcggttgcgcacgtcgagccgcacgatgtgcagcgcttggccgagttcttcctgcagctcttcaagacgctcaaggcggcgcccggcggcgatcacacgatggccttcacggataaaacggcgcgcaatggcctcgccgaaaccggaggtggcgccggtaacaaaaataatcatgttgctgttcctcaactgtttttaccctacatgcctctatcattagcacaaacccgcaggcagtggcaggggttatcacggcggaaagcaaaaaagatgacaccgggccggcggcccgatgctgactagcgctgaggcggcaggtgatacaccacggcgtcatacttgatgcgctcgcaacggccggccagcacgccgcccagcgactcgacgaggcggcggctggcggtattctgctcggccaccgggtagagaaagtgcggcggctgaaagcgctcgctggcccagcgcgcgatgccctgcacgatttcgcggccgtagccctggccatgcaggctctctttaacccagatgcccagctccggggtgtggctgcgcagattatgcgcgccgccgacgccgacgaactgccggtcttcgcgccggcgggcgacgaagatcacttcttcaccttcgcgcatcaacggcagccagccttgccagacgttggcgaaatcctccggcgacgcctccggcgacgcctccggctcaaaggtcataaagcgcgtcagagtgggggtgatcgcctggtaaacatcgtcggcgtctgctgcggtaaagggggcaatcaacaaacggtcggtgtcaacgcggcactgagaaaggtcattatgattcatcttattccctcgcttttcaggccagaatggcaaaaaaatccgcgcccataagttggggcggatcgtcgatattacgcgcattggcgtcagaagcgacttatttttcgccgctgcggcggcgcggaggaacggctttatgtgacggcgtcacgttgatgagaaagacggcgagcacggttaaccgcgcccgccgctgcggatcagaacttcaccgaaccttgcagataaatcgtgcgcggctggccgatgtacagacccttgttgttgtcgtcataggcgcgggtgaaatactcgtggttgaacaggtttttcacgccgacgcccagattcaggccggccatttccgggccgaaatcataggcggcgcgcacaccccacagcatgtagccagggatgcggccggtgctgccgtcggcgctttccgccacggtgttggcgttgtcggcgaactggctggactggaactcgccgttaaggttaaacgcccagttgcccggcgtgtagtccagccccagcgtgcctttatgcttcggcgagaacggcacctggttgcccttgtagccgccgtcttcgcggatggtggcgttgacgtaggcgtagctggcgtaggcggtcaggtcgtccagtttcggtgtcagctgcgacagatcgtaacgcaggctgccttccagcccggcgtggcgggttttgccgcgcgcggtcacgctgtcggtcacctggttggagtcgtactggttgttgaagttgatcaggaacagcccgatctcgccggtcagcgcatcgccggcgtagcgggtgcccagctcccaggtgcgcgccttctccggttcaattttgccgctgtcgaccgctttgcccatctggctgtattgcacggtgccgaaggagccttcggtgttggcgtacaggttccagtattcgttcaggtgatacatcacgttcaacgccggcagcggcgcgttatagctgacgtcgaggcggttgttcttgatgtagttgttctgatacgacttgatgtactcgtaacgcatgcccggcgtgagggtccagtcgccgatgtcgatgcgatcgtcgatataaaacgcgtgcgcctcggtgccggactgggtgtcgcgatcgtacgggctggcggtggacggcagcctgccggtgctggctttgctggtgtagcgcagttcgtgggtggattcgctgacgtagcggtagccgacgccgacctcatgcgccgagtcgccccagcggaagctctggctgtagcgcggttctacgccgcgcacccagtattcgcgcggcgacagcgtcaggttcttgccctgatccagatagccgctgcgcagggtgtaggtgtagaagctctgcacgtcgaacttgtgctgccgatccggctgatattggtagccgaagttcgccaactggcggcgaccccagaacttgtcgtacgggcgcgtcgactggaacgggttggcgttgtagtccgcccggctcagtccgcccggcatgttcgcttcgccttcgtagtattgcagcaggctgttgaaggtgtgcacctcgttcggggcgtagcggcttttcagcatcacgtcgtcgattttggtcgcgctgtgctcgcgccagtcgctgccgcgggtgccggagtagagcagcgccgcgccgaagccgttgtcggcggtgccgccgatcatcaggttgccggtgcctttcgggtgatcctggcgcgaggtcgggctgagctgcccctgcatgccggcctccatgccgaaggttttcgggatggcgcgggtgacgaagttgacgacgccgccgacgctctgcggcccgtagcgcaccgcgccgccgccgcgcaccacgtcaatcgcatccatattgccgagcgagaccggcgccagcgacagctgcggctggccgtaaggggcgaagggtaccggaatgccgtccatcagcacggtggagcggctggcgaggcgcgggttgaggccacgaatgccgaagttcagcgccatatcatggctgccggtgccgttgttctccggcgccaccacgcccggcacgcggttcaacgcttcgcgcacggtggtggtgccggttttggcgaagtcttcgcggcgcaccacgtcgcgcgcgccggggtgttcgaacacgtcgatctggcggccttccgccagccagtcaccgactaccgtgatgtcctcttccttgtgcggctgcggcagtgtggccagcgtgtaaccgttgttgccgagcgctttagcctgcaggccgctgcccgccagcagggcgttcaggccgtcgtcgacaccgtagctgccgttcaggcccggcgaacgtttacctgcggttaacgcgccgtctaccgagagtgcgatgccggcgcgagcggcgaaagcgttcagcgcgccgtccagctcaccggctggaatgtgataggttgccgcggcgctggcggcgctcgccatcagcggtgcggcgaatgccaggccaatagccacggccagcggtttggcccgttttccccaaagcgaagccggagcgacctttccccaagcgttgttcataccttctcctgaatcatttttatttattgctgcagtgttttcctgggagtcggatgagcaaggcaaaagggacaatcaaaaatgcgattttttatcattttcatttaaaaagattcaggcggggacgatttgcagccaatagcgggtaaagctctgcagacgtatcggcagggtctggctgagcagggcgagggcgcgatcggtatcgttgagcgggaaactgccgctgacgcgcaggccggcgacggccggatcgcagctcaggtggccgcgccggtagcgcgccagttcggcgatcccccggtccagccgccactggctgacgctcagcacgccgcgcagccagccgtcctccgccgcagccgattgcttgtcgccgaaggccgtggcgctgaagctaatctgttcgccggcgttcacccggcgcgtttgccgcgcgtcctgcgccagctgcgcttcaaccgcatgctccagcaccgtcaggcgcgtctcgccagcgctctcacgcaccaaaaagcgggtgccgagcgcgcgcatcgccccctgcgggctttgcacccacagcggccgggggtcgtgtccggtgatcaggctgatttccccggcgtgcaagcggatcagccgttgacgattgtcgtaatgtacgtccaccgcgctggcggtgttcagcaccagctgggtgccgtcgcttaacacaatgggtttgatctcgccggtggcggtgcggtagtcggcgcgtagctcccggccgaacggggactgataaaagaagccgccgccgcccacgccgagcaacagcagcaggcttttcagcagggtgcggcgatcgatcgccgcctggcggccggcgctgtcgagcgcacggtagctgaacttgcccggcacgccctgcagctggctctgcaacgcttcgacgcgccgccatgcccagcggtgatcgtcatgctgctggtgccaggcttgccactgttggcgctggcgctcggtgacgtgctcgtcgcacagcagcgcataccagtgtgcggccattttcagcgcctggcgctgctcgggggtgatggcgttgctcatgaataaacgtcgttttccaggctgaacagcaggcaatgctcggtggctttggccatgtattttttaaccgagctgaccgacacgccgaggcgcgcggcgatgtccgcatagcccaggccttcgagctgcgacaacagaaaggcctgcttcaccttgggcccgaggccgtcgagcatggcgtcgatctgctgcaggctgtccagcaggctctggcgctgctccggcgacggggcatagccttccgggatcagcgccagcatctccagataggcgcgctccagcgttctgcggcggaacagatcgaccatcacccgtttggcgacggtgaccaaaaagtctttcggttcgcgcagggttgccgcggcgtcgcttctcagcaggcgcataaaggtgtcctgcgccacatcgtccgcatcgaacgcgcagcccagccgccgacgcaaccatccctgcaaccaggcgtggtgggtggcgtaaaggcgcgacagcgcggcgtgcggggcagaggcggtggcggacatggttttcgcattgctggtcaaaaagatgcgcggatgataattgagaatggttatcgtttcaagtttggccgttgtccttaggccgagattcaacccccaggcgtggtgttgaaataagccgtgcgccgtgaagatattcgcttgctcattcaaggtgcagcgacgcgatgttattttggcaggcaaacggttgctatttatccgccgtcgaagactgagcgtgggtcttattctctttcgccggcctatgctttcaggttaattaccaatcaattgtttttatttaaaaatatattttatcgccgcctgttggcatgcggcttgctatgcttaagccggtctttacgtttgggcaaaaaagccttgtttcatcggcgcaggttatttcgcgggtgagcttggccggtcgtcacaaggaagaaaataatggcactgcaattcaccacggctattcggggcaatttttttgatatcgcagcctgtgtggaggcgccgcaacagctcgaggaacgcctgcggcatgttcccgacggtttgctgctgctgaacgacggcgtcatcgtctggttcggcagctggcagcagggcgaggcgctgctgccgccgggcttcacggtcacggaatatcacgacaagctgatcgtgccgggatttatcgatacccacatccactacccgcaaaccgaaatgattggcgcctatggcgaccaactgctggactggttaaacaattacaccttcccgaccgaaagccgttatgactgtgagcagcacgccgatgcgatgtcggccttctttttgcagcagttgctgagtaacggcaccaccaccgcgctggtgttcggcaccgtgcatccacagtcggtcgatgcgctgttcagccaggcggcagcgctgaacatgcgcctgatcgccggcaaggtgatgatggatcgccatgcgccggaggcgctgctggaaacgccggcgcagagttaccgccagacgcgtgagctgattgaacgctggcacggcaaaggccgcctcggttacgccattacgccgcgctttgcgcccaccagtacgccggcgctgctggcgcaggtgcagcggctgcgcgaagagtatcccgacgtttggctgcagacgcacctgagcgagaacccgcaggaagtggcctgggtaaaagcgctgtttccgcagcaccgcagctatctggatgtttaccaccgttatggcatgaccggcgataaaagcgtgttcgctcactgcctgcacctggaggagcaggagtgggactgcctgtgcgatacccgctcggcgatcgccttttgccccacctccaacctgtttctcggcagcgggctgtttgacctgcagcaggcctggcgcaagcgggtgaagctcggcatcggcaccgacgtgggggccggcaccaccttcaatatgctgcgcacgttaggcgaggcgtacaaggtcggccagctgcagcattaccggctctccgccgtagaagcgttctatcatgccaccctgggcggcgcccgcgcgctggcgctggacgacaaaatcggcaacttcaacgtcggcaaagaggcggatttcgtggtgctcgatccggcggtgacgccgctgcagcagctgcgtcacgccaacagcgccacgttgatggagcaagggtttgtgctgatgacgctgggggacgatcgcaacatttatcgcacctatgtggacggtaaggtggtttatcaggcggcgcgctgacacagccgcattcattcctggtattgaagcgtccaacgtcgctgtctttctctggttattgtgcgggaaaaggcgggagagacgtgaagtcattggtacagggttaacactgttgagcggatactatttatttatcaggaatgacactgcgcgtatttttaattaaacactatataaaggatttattgctcatgctcgtatctgacccccgttatcacttgttagccgtctgcagcgctcagcatctgcgcgctgtagctgaaaggatctgtgctcgcgataaactagaaccgctagcatttgatgctgttctttggcggagttgttggacatcaccactgccaaccatatcgccagagtcgtcaagtgagtttttgcaatcggtggggcatgtttatcctcgcgccacttatgagctaaggtcttggctcatctctggcggacgtaagttggatctgcaagctgccgacaagctgatttatcttgctcgcgtgatcgagaaggagtggaaagttgaagagcaaccttctgtttggcgcaagcaccccagcaacaggcttaatggttatgcatacaatatcgtacagattcttatacataccagcgtatctgaggactatccaaaggagaataatatctctcaccggcatgatttgcttacgcattcaccgagtaactcaaggctcacggcttggatggaaaaatatcaacatagctcaaaagatccctttgttttcgcacggcttgatgtgacacgtatcagtaatatgagggagttgtttctgtggcagatttcgcttgaaacccgtagcggattatatacttcggcaaccttcgaggctgcagtggggaaaagaatcaggtcatacgatcgtccggtgcccggtcggcgcattcaagcgtttataggttatatctaatcgagttaacgcaccgctatacgccacagggagcgaatcatcatgggaggaatattctaatcacttgtttttgctcaaactgccaactgcgcctaagctaggtgatgactcagagggagccattccccgagaccttattccgtgaacatggaggagtttcgatttgatgcgtttatccacattggtgctggcgatcggcatggcgctgggctcgcaggcacaggcagcagaaacccaacctcacgccgaccatagcgcgctgcccagcggccaggcgaaggaggctaccgtgaccggtgaagccaatcagcacgacaagcaaaagacccaaaacccgttcttctatcaaagccgtctgccgttccaggcgccgccgttcaacctgatcaaggagagcgactacgcgccggcgatcgaagcgggcatcaagcaaaagcgggaagaggtggagaagatcgccaacaacccggccaagcccaactttaaaaataccttcgtggcgctggagcaggccggttcgctgctgacgcgggtgatgaacgtgttcggcgccatgacctcggccaacaccagcgacgcgctgcagaagctggatgaagagacctcgccgaagctggcggcgctgaacgacgacatcatgctcaacggcaaattgttcacgcgcatcaaggccatttatcaggatcgcgatgcgctgaagctggatccggaatcgcgccggctggtggaagtgacctacaagaacttcgagctggcgggcgccaacctgtcggacgccgacaaggccaagctgaaagcgctgaaccaggaagcggcgacgctgagcacccagttcaccaacaaactgctggcggcgagcaaaaacggcgcgctggcgataaccgacccggcgaagctggacggtctgtccgaaggcgaactggccgcggcagcgcaggcggccgccgaacgcaagctggagaaacagtggctgctggtgctgcagaacaccacgcaacagccgttgctgcagagcctgaaagatcgcgacacccgcaaagcgctgttcgacgcctcctggacgcgtgcggagaagggcgacggcaacgatacccgccagaccatttcccgtctggccaaggtgcgcgccgagcaggccaaactgctgggctacccgaactacgccgcctggaagctgcagaaccagatggccaagacgccggatgccgcgctgagctttatgcgcaacatcgtgccggcggccaccgcgcgcgccgagcgtgaagccaaagacatacaggcggtgatcgatcagcagaaaggcgacttcaaggtgcaggcctgggactggcagttctacgccgaacaggtgcgcaaggccaagtacgatctggacgaatcgcagatcaaaccttacttcgagctgaacaatgtgctgaacaacggcgtgttctacgccgccaacctgctgtacggcatcagcttcaaagagcgcaaggacatcccggtctatcagccggacgtcaaggtgtatgaagtgttcgacaaggacggcaaatcgctggcgctgttctataccgattacttcaagcgcgacaacaagggcggcggcgcctggatgagcaacttcgtcgatcagtcgaagctcaacggcaccaggccggtgatctacaacgtcgccaacttcaccaaaccggcgccggggcagccggcgctgctgtcgtatgacgacgtgatcaccatgttccacgagttcggccatgcgctgcacggcatgttcgccgatcaggagtacccgagcctgtcgggcaccaacaccgcgcgcgacttcgtcgaattcccgtcgcagttcaacgagcactgggtcagcgatccgaaagtgttcagccatttcgccaagcactaccagaccggcgaggcgatgccgcaggaactggtcgataagatcaagaaggccgacaagttcaacaagggctacagcatgaccgagttgctgtccgccgcgctgctggacatgcactggcatatgctgaccgccgatcagccgcagcaggacgtggacaagttcgaggccgagtcgctgcaaaaagacaaggtggatctcagctatgtgtcgccgcgctaccgctccagctacttccagcacatctggggtaacggctacgccgcgggctactacgcttatctgtggacggaaatgctggcggacgacgccttccagtggttcaccgaacacgggggcctgaccgccgaaaacggccagcgcttccgcgacatgatcctgtcgcgcggcaacagccaggatctggagaagctgtacatcgactggcgcggcaaagagccgagcatcgagccgatgctgatcaaccgcgggctgaaggacgagtaagttcggccattcccggtaagcaaacaaaagggcgcgttatgcgcccttcgtctttttggcttggccgacagtcagcggttcaccaccttggccggcagggccaccaccagcagcgagctgagcagcaggcagccggcgaaggcccagagcgcgccgccgctcttgccggtcagatccagcgccagccccatcagcgaattgctcaccagcccggcgatgttggccagcgagcaggccagcgcgaagccggtcgccgccgccgtgccgcgcaggaaggtggccggcaggctgaagaacaccggcaccgcgccgatgatcgccgcctgggcgatggagaacagcagcaccgtggccagcgcattgtgggtgaagaaggtgctgccggccatcgccaacgcgccgacgataaacggcacgatgatgtgccagcgccgttcgcgcagccggtccgaactgctgccgatcagcagcatgccgagcagggcggcgacgctggggatcgccgtcaggtagccgatggtggtgatgtcggtgacgccggcggttttgatgaaggtcggcatccaaaagcccatggcgtaggcgctgagcagaatggcgaagtcgatgccgccgagcatccacactttcaggttgaagaagccgtcgcggaagctgtgcttgccgtgatcggcctcggcgtcgtcacgcgccaaatcgtcggcgatgcgctgcttttcctcgggcgtcagccacttggcctgctgataagtgttaggcaacagccagaaggtcagcacgcccaacagcacgctgggaatgccctccagcagaaacagccactgccagccgtgcagcccgtggcgcatgtcaaaatggcccatgatccagccggagagcggcccgccgatcacgctggagagcggcaggccgatcatgaacagcgcgatgatgcggccgcggcgataggtcgggaaccacagcgtcaggtaaaagagcacgccgggcaggaaaccggcctccgccacgccgagcagaaagcggatgacgtagaactgcgtcggcgtggtgacgaacatggtggcggtggacagcagcccccaggtgatcatgatgcgggcgatccacatcttggcgccgacgcgctgcaggatcaggttgctcggcacctcgaacagaatatagccgacgaagaacagcccggcgcccaggccgaaggccgcttcgctcagctgcagcgcgtcggccatctgcagcttggccagcccgacgttgatgcgatcgaggtaggccgccagataacacaggcaaagaaacgggatcagtttccaggtgattttgcggtacagcagcagcgattctgcgtccgctttccccgccagcggggtgtcgacaatggccatgatgttgtctccaggtggtgcgtgttggcctccgcaggaggcgcctgttgtgtttgcgtgcatggacgccgccctgtttcgggcggtcgcctgaggcgctgtctgcgccttcgttattgtcgttgcaggtgaatcgttgattcataaccggttcagatagtcgagcgcctcccgtttgtgcaccacgtcgccgtatttgctgtcgatgtcgaacaggttggcttcgtgcgggccggggtgacgatcgccgacgcactcgcgcaccaccatggcgcgaaagccgtgctgcaccgcgtccaccgcgctggcgcggatgcagccgctggtggagcagccgatcatcagcagcgtgtcgatcccttgcgccaccagcagcggcgccagcgcggtgccgaagaaggcgctggcgtattgcttgctcagcaccacctcatcgcccagcggcgccaccggcgggcagaacgccgccagcgggttgccttccaccatgtccttcatcaccggcgctttcttgacccacaggccgccatcggcaaaatggcctgcatgatagcggatatgggtgtggatcaccggaattcccgttcggcgcgcacaggccagcagctcgcggctttcctcgactgcgcttactacgcccggcgcgaacagcggcgcgccttcggtggtgtaggcctgcataaagtcgatcgccagcagcgccgggcgccggccgaagccgatgcgctggccccagacgccgcgatagttgtcgctgagggtgtcgttcattctgcctcctcaataggcgccggacagcagggcgccggcgccggggacgatcggctccagctccagcgcggtcagcatcgcgtaagtggtggcgatggcggcggtgatcaccggtttgccggtttgggcctccaccgtcgggacggccggcagcgaaggcatctgcacgcaggcggacagcacgatagcatcgacctcgcgtaagtccatctcggcgacgatccccggcagcctggccggatcgtgccggccgacttcgaggttgtccgggatctccagcgcgcgccataccttgacctcgatgccttcgtgctggatgtagtccaccaccagctgggtcagcggtttcatgtagggcgccaccagcgcgatgcgtttggcgccgatcaccttcaggccgttgaccagcgcgccggcgctgctgataaccggcgcggcggcctgattgtctttcgtcacctgcgccagccgggcctgcgattcgcggtggtagcccagccccatcgccatgatggccaccaggcaggcgtagccgagcacgtcgacccgcgcgtcggacagctccagcgcgcagcgatcggactcggcgtccatcgccgccaattcttctttattgacgtgtttcatgcgcatgcggctggagtgaaaggtgaaacgctccgggcgtatcagctggcgcgcgcccagcatcgccgggatctcggtttccatcgtggtgttggagctgggcacgatctggccgatgcggtagtggttgctcatgtcggtgttcctcagttaatccagaaaatcgcccagggcgcggaagaagccgtcgaaatcgtcccacgggatcatgtgtccggcgttctcgacctcgacgatggcgatctccggctgcagcgcgcggatctccgcccggtcttcgggctgaatgacgccgcctttgcccgcggccatcagcagcgtcggcatggtcagctgcgggtagtcgcggtggctgtccacctgatgaaaatcgtcgtaggcgcgttggatagccggctcgtagcaggtatgcagccactcggcgcgcagctgacgctgttcttcgctccaggttgggcaaaaggcgcgcatctgctcggcgctcatgcccggctgcgactgccggatggagtcggcgtaccatggccattggccgggataggcgcggcggccggggccggaaaccggcggatcgaccagcaccagccgccgcacgccggcgggccgcaaagcggcggcgcgcagggcgaagcgggcgcccatcgaatggccgagcagggcgtaactgtccaggttcagcgcggcggcgaaggcgttgacgtcctgtgcgcaggtctctgcgtcataagccagttccgggccgctggacgacaaaccgcggccgcgcacgtcgagcacgtagacgtcgtatttttcccccagccgctcggcgacgaagccccaggtgatcgccgggctggtgatgccgggcaccaggatcagcgccgggccgtggccgccgtagcgcagatagtgttggcgaatgttgttggcgtgaacgtgggcgccgtagaggaaggtgctcatgcggcgttctccgatttcagcgcttgcgcgtacaggtcatagccgtaaacccaggccggatcttcctgggtgcgcaggaaggtgttggcgttggacaccgcctgcaccctggaggcgcgttccttgcggttggcttcatacagctggaaggcggtgcagtagtcgccgaggccggtttcctgcaggcagcgggtcagcatggcggcgtcttcgatcgccatcgccgcgccctgcgccatgtgcggtttcatcgggtggcaggcatcgccgagcagcaccagacggccttcgctccacaacggcagcggtttgcggttcagcaatggccatttggtgacctgttcgctggattcgatcagcgcctgcacgatcggatggtagccggcgaaggtctcgaacatctcttcgcggctgctgtcgatgaagctgccctggaaatcccaggccgggtgcggcacgccgctgacgtagtaatattcgtcgcgccgttgggtggtgtagtagaccatcagatggcgatccgccgaccaccacttcacgcagtcttcgaacgtcaggttgtatttcgccagcttctcgccgcggatcagcgcgcggtgggccacccagccgctgtaggtcggcgcttcggcgcccagcagatgctcgcggatgcgcgagttgatgccgtcggcgccgatcacgatatcagcgtgggccgaggtgccatcgacgaagttcagcaccacctcgtcaccgcgatcttcaatcttgctcaggcatttgccgaagtgcagggtgccgggctgcagcgcggagagctgcaacgcctgcaaatcgccgcggtgcaccgtcacataggcggcgccgtactcccggcgggcgaaggcgcccagttcgatgcgcgacaggtagtcgccgctttcggcgtcgcggctgaaccagaaatcgggatgagacgccatctgctccaaccgttgctcaataccgagacggcggaaaatcttcagcacgttcggccccatgtgaatgccggcgccgaggcgcgagaacgccgggctctgctcatacagatcgacggtaaagccggctttttgcagcagcccggcggcggcggcgccccccagcccggcgccgacgacggcgatgcgtggttgtttgctcatcatgtttcccctgtctgttggcttttttcagcgtaggcccaacgcatggttggacgattgatttatagtgtatgcactagataacgcaaagttgcaaaagtgttaaatcagatcttgctcacgctaattgacagcacattactgttaaactcatgttaatcacaggattgataaggcatgaaataggactttcttatgatggccatctgtggcttgctttctcttccttttttgacttagataaaatgagcgtgttcactttaaatcgtttgaaaaataaccgccgccttgcgggcgtcggatacccttgacgtgacaggagacaggccatggcggtcaatgaaacccagttggtacagctgttcgagcaggtgcttacgctgtcgaaggtcgatgcttcgcagagcgtggcgattttgaaaagccattattccgatgcgcgcacggtgcgcgccgcgaccgacgcggcgctgcggctgggcgccagggtgtatgccgtcgaactgccggcgttcaaccatccgcgggcgatgggcaacgacatgaccgcctattgcggcgataccgcgctgaccggcaacctggcggcgcagcgtgcgctggaggccgccgacctgatcgtcgataccatgatgctgctgcattcgccggagcaggaacagatcctgaaaaccggcacccgcatcctgctggcggtggagccgccggaggtgctggcgcgcatgttgcccaacgcggaggacaaagcgcgggtgctggccgccgccgccgtgctggagcaggcgaagctgatgcaggtgacctccgccgccggcagcgatttccgcgcgccgctcgggcaatatccgacggtgaccgagtacggctatgccgatgagccggggcgctgggatcactggccgagcggtttcctgttcacctggccgaatgaggagcaggcggagggcgtgttggtgctggaggttggcgatatcttgctgccgttcaaaagctatgcgcgcgaacgcatcacgctggagatcgaacaagggttcgtcacccgcattcacggcggttttgaggcggaatacctgcgcgaatacatgaaatactttgacgatccggaagtgtacggcatctcgcacatcggctggggcctgcagcctcgcgcccagtggacggcgatgggcctgcacgacaagaacgacggcatgtgcatggacgcgcgcgcgttctacggcaacttcctgttctccaccgggccgaataccgaagtaggcggcacgcgcaaaacgccttgccatatggacatcgcgctgcgccgctgcgacattcgtctcgatgggcaaacggtggtggcggacggggaagtggtggcgccggaggcgtcgcgcgtgcgccgggcgtaatcgttgctgccaacggcgggggtttgtactattctcgtggattccatagatggtgagagtaacgcaatgacgccccccgaatacccgtcagccgtgagcggccaacccgaaaattatcattttaccgagcaagtcgggcacctgctgcgcaaggtttatcagcgccacgtggcgattttccagcaaaacgtcggcgattcgcagctgacggcggtgcagttcatcaccctgtgcgcggtgcgcgatatggggccgagctcgctgaccgagctggtgcaggtgacggcggtggatcaagccaccatccgcggcatcgtcgagcggctgaaggcgcgcgatctgatcacggtgacgccggatccggtggatcggcgcaaggtggtggtcggcctgaccgacgccggcggcgcgctgctggcggaaacggtgccgcaggcggccaaaatcacagaattgacgttcggcacgctgaacccggccgaacggatagcgctgatattcctgctgaataaaatgctggaagaccccgccaccggctgattcgcccgcgcaacgtcggttgcctggtggtcggtggcgagaggccagcccataagaccatcaagtgcaggcggagacgcaaacaatggcgatatctgaagtgcaatcgcccagggaaggcgcgaaaaccacgctgacggagcatccgctgatgctgtcggtgaacggcgaacagcttcatgcgcaggtgatggcggatacgccgctcttgctggtactgcgcaacgatctggcgctcaacggcccaaaatacggctgcggcctgggcgaatgcggcgcgtgcaccgtgctgatcgacggcgtggcggcgcgctcctgcgtgatcccggccctcggcgtgtccggccgggcgatcgtgaccctggaaggtctcggcactcgccggcgcccgcatccggtgcagcgcgcctttatcgaagagcaggcggcgcaatgcggctactgtctcaatggcatgatcatgaccaccaaagccctgttggatcgcaatcccgccccgagtgaggcggagatccgtcaggcgctgtccggcaatctgtgccgctgcggcacccatcttgaaatcctgcgtgcggttcagcgcgccatcattctctgccgcgatgaggacgcccacgatcatgactgattcccgtaccccatcgccgagccaggccgaattgctgcagcgcgacggcgttctgttgatcgtcgacagcgtgcaaccgccgccggggctggtgcccaaggggcaaacgccggtgctgaagcccaaggagcaagggttgtttatcgccctgtgcggcagcggtgaaatctatgcctttaacggccatgtcgatctcggcaccggcgtgcgcaccgcgctcgggcagatcgtcgccgaagagctgtacctgcgcatggatcaggtgcaaatggtgttgggcgataccgagcgcgcgccgaatcagggcgccaccatcgccagcgccacgctgcagatcgccgccgtgccgctgcgtaacgccgccgccgaagcgcgccgttggctgttgcgccaggcggcgcagcgcttcgatgcgccggtggaacggctgacgctggaggagggcgtgatccgcagcccgcaggggcaggcgctgagctacgccgagctggtggccggcggtcatgtcgagctgtcgatttccggcgacgcgccgctgaaaccgcaggcggagtatcgcctggtgggcaccagcgccgcgcgcgtcgatattccggccaaggcgaccggcgaaaccacttacgtacacgatatgcggttgccgaatatgctgcacggtcgggtagtgcggccgccctatgccggttacgacagcggcgaatttgtcggcaccagcctgctggcggtggacgaaacctcgatcgcgcatattcccggcatcgtcaaactggtggtgatcggcgatttcatcggcattgtcgccgagcgcgaagagcaggcggtcaaggcggcgcaggcgctgcaggtcagttggaaagactggcggcgcaatttgccgcagatgaccgacgtggcgcaggcgctgcgcgacaacccgcattcgacccgggtggtgcacgataccggcgacgtggacgcggcgctggcggcggccgacaggcgtttcacccgcagctatctgtggccgtatcagcttcatgcctcgattggcccttcctgcgcgctggcggactaccggccggagcgtctgcaggtctggtcaggcagccagaacccgcacctgctgcgcgccgatctggcctggctgctggagtacccggaagcgcagatcgagatcgttcgcatggaggcggccggctgctatggccgcaattgcgccgatgacgtctgcgccgacgcggcgctgctgtcgcgcgcggtgggcaggccggtgcgggtgcaactgacccgcgaacaagaacatgtgtgggaaccgaagggcacggcgcaactgatggaggtggacggcgggctggacgccgccgggcacccggtcgcctacgattttcgcacctattatccttccaacggcgcgccgacgctggcgctgctgctgaccggccgggtcgagccgctgccggtggcctatgaaatgggcgatcgcacttcggtgccgccttatgagtatccggcgctgcgcgtcagcatcgaggacatggcgccgatcgtgcgtgcctcctggatgcgcggcgtttccgccttgcccaacaccttcgcccacgagtcttatatcgatgagctggcccacgccgccggcgtcgatccgctggagtatcggctgcgctacatcaatgatgaacgcgccagtgaactgatgcgcagcaccgcagaacgcgccggctggacgccgcataccgaaccgatgcagaccccgacggaagacggcgtgctgcgcgggcgcggctttgcctatgcccgttacatccacagcaagtttcccggctttggcgcggcctgggccgcctgggtggccgacgtggcgatcgacaaagccagcggcgaagtggcggtgacgcgcatcgtggtcggccacgacgcgggcatgatggttaacccggacggcgtgcgccaccaaattcacggcaatgtattgcaatcgaccagccgggtattgaaagagcgcgtgacctttgaggaatcgacggtctcagccaaagaatggggggcctacccgatcctgaccttcccggaggtgccggaggtggacgtggtgatgatgccgcgcccttacgatccgccgctgggcgccggggagtcggcgtcggtgcccagcgcggctgccatcgccaacgcggtgttcgacgccaccggcattcgttttcgcgagctgccgatcacctcggacaagctgcgtgaggcgctgaacgggccggatgccgaacggcaggccgcgccgcccaagaaaaagaagcgcggcaaatggtggttcggcggcgcggcggggctgttcggcgccgtgctgggcatcgccggcagcgccttgccgtggcgggcggagatcgcgccggtggcgacgcccggcgccggcacctggtcggccgccacgctggagcgcggccgtcagctggccgccgccggagactgcgcggtttgccataccgcatcggaaggggcgaccaacgccggcgggctggcgatggcgacgccgttcggcacgctctacagcaccaatattaccccggacgtggcaaccggcatcggcaactggtcgtttaccgcgttcgatcgggcgatgcgccagggtatcgcccgcgacggccgccacctctatccggcatttccttacaccgccttcagcaaaatgaccgacggcgacatgcaggcgctgtacgcttatctgatgtcgcaaccggcggtgcgccagagcaacccggccaatcagatgcgtttcccgtttaacctgcggccgctgatggccggctggaacgcgctgttcctgcgccagggggaatatcaacccgatccgcaacaaagcgcgcaatggaaccgcggcgcttatctggtcaacgggcttggccattgcgccgcctgccattcgccgcgcaacctgctgggggcggaaaagggcggcgcggctttcctggcgggggggatggtggacgggtgggaagcgccggcgctgaatcaattggccaacgcggacaaaccctggaccgaggaacagctgtttcagtatttccgcagcgggcattccgtcgagcacggcgtggcggccgggccgatggggccggtggtgagcgagctggcgacgttgccgcagagcgatctgcgggcgatggccaattatgtgatgtcgctgagcgccaaatcgacgctgaacgtggaaccgcaggcgcagttggcggctcgcgcattgccggcggtggggcaacttgccggtgagcggttgtttcagggcgcttgccaggcctgccacagcgccgccgccggcgggccgcagctgttcggcgtcagcccggatctggccaacaacaccaacatcttcagcgatcgccccgataacctgatcaaggtgatcctgcaagggatccccaaaccggccaccgccgaattgggctttatgccgggctttaaggacagtttttccgatcggcaggtaacggcgctggtgaattatttacgccaacgctatgccggcgacaaaccggcctggcgcgacgtggaggcgcaggttgcgcggctgcgcgcagagccgggcacgcactgagccgcctcaggcatggcgcaggaacgccaccagccgctgcgccggcagcggcaactgcgcagggtcacgcaccgcgatcgacaggcgccgggtcgcccaatcgtccgtcagcggcagtgcgctgtgccgaatttccggctggcgttgtgcgctctcttccggcaccaccgccagcccggcgccgcgcagcaccatgcggcagatggcgtcgaaatgagcggcacgcgcccgcagccgcatcgggccgccgctgcgtatcgccaattgctcaagatgctgttgcagcgcgctctcttccggcaggccgatgaaatcaaaaggcagggcgtccgcaaagctgacctgccggcggccgctgagcgcatgccccggcggcagcgccagcaccagacgatcctggcgaaaagggtaacttgtcagcccgcgcagatcggcgtgatccgcgacgatgccgatatccgccgcccgttcggcgattgcctgcgcgatggccgggctgggcagctcttccagcgcgatatcggtgtgcgggtgcagcatcagaaaatccgccaacagctccggcaaaaaggcgtcggcggcgacggtattggcgacgatgcgcagctggctgcgctggcccggcgcgaactcggccatatcaccgcgcagccggtcgcgctgctgcaatagcactcgcgcgtgatgcaacaggcgctcaccggcgggcgtcgcctggacgccgcgcggattgcgcgtcagcagcgctacgccggcctgttgctccagcccgcgcatgcgggcgctggcggcggccagcgacagcccgacgcgctcggcgccggcggtgatgctgccggtctcgagcactgccgccaacagccgcagatcgataaagtcaaaatgcatgcgttttccctctgtctttgccgcaggcaggctctgtcattgccgcattgtgccgcggcgcggcgctggccacaatcgagccgttgattcgccataaggatagacgcatgtcgctgacgttactcgaaattgtcgccctgacgggcatttttacactggccggcacggtcaaaggggcgatcggtctggggttgccgacggtgtcgatggggttgctcagcctgatgatgccgccggggcaggccgccgcgctgctgctgttgccctcgctgatcaccaacctgtggcaactgctgtgcgggccgacgctgtgggcgctgtggcggcggctctggccgatgatgctgtgcgtcacgctgggcacattgttgagcgcgggggcgctcactgccggcgacggccgcctggcgccgctggcgctgggcatgtgtctgatcggctatgcgctgctgggattcacccgttttgattggcgcatttccgccgtggcagagccttggctggggccgctgtgcggcctggtgaccggtacgctgaccggcgccaccggggtattcgtcattccggcggtgccttacctgaatgcgttgggcctggcgcgcgatgagctggtgcaggcgctggggctgtcgttcaccgtctcgacgctggcgctggccgcagggttggcctggcatcaggcgctgcccggcacgctgctcggcgtttccttgctgtcgctgttgccggcgttggccggcatgtggctgggcgggatcgtgcgccgtcattgtcgcccgcagctgtttcgccgccttttctttattgggttattaatcttgggcgttgagattatttggcgattcaattaattgaatcgatagcatctgcgtgtaatcaggttcggtatattattctgggttttattttaatatgatagcttgcaatgtttagaacacacttttcttattggttttttcatgaaatacaggatggttatggattgttattagtgtgttttactttttcaactataacccttttaaaatgggataaccccagtgaatgtataggggaaccttgatgaaggaaattttaagcagccaattcgatgcggtgtcaggtggatggcaggatcgagatgggagtggaaaaagagcgtctgataacggagatggggtatatgatgaatagatatgttgtttttataaagagtgatgaatcaaaagtgctaagaaaggaagtggttacacgagaaataattaaagacatgaagcagaaggggttcagaaagcatcatatcgaagtagaggctgataacgaaagcgatgccattaaaaaattaaataagaacagcaatgattatttggattcattgagaaatttttcaggtgatttattgttctgttctatttttgttattgttatgacgatagtctattttaccacgatgaaaatgagttagaagtagatactgtaggatttaaaaaataaaaaggcttgtcgaactggatctctctgatttttctctggatatgatactgccattgggtgaaatatacgttcataaaaatttattggcgctaggatcactcagaagatttaaaggtgtttattctaatggtttcatatcctctcaccaaaattaactgaccttctgcttattttattgtcaatacagtagcctgtgaatttgaatgttagctatcactaagggacgctgctcatgtttcgccaggaagcgatcgagaatcagaaaatgaaatggcgtggcagggcgctcctgctacccggtattcccgtttggggcacgacagggctctgcctgtttttcttcatcgcctttctcaccttcgcgatcgccggcacctatacccggcgggtcaacgtgaccggtgagatcagcacctatccccgcgccgcgaacgtttactccacggttcaaggggtagtggtcaaacaatttgtcaccgaagggcaggtgattgccgccggtgcccccatttaccagattgacgtcagtaaaagcacccgcagcggagtggtcagcgataaccagcagcgggatatcgatgaccagctggcacgcattgcgcaaatcattaaccgactggaaagcagcaagcaggccacgcttaccatgctggagaaacagaagacacaatataccgctgcgttcacccgctccaccgacatcctcaaacgcgcccaggaagggatacgcatcatgaaggagaacatggagaactaccggcactatcagaccaaggggctgatcaacaaggatcagctcaccaaccaggtggcgctgtattaccagcagcagaacaacctgctgggcctgtccggccagaatgaacagaatgcgctgcagatcaccgcgctggaaagccagatccatatccaggccgccgaatttgataaccagatctaccagatggagctgcagcgctacgagctgcaaaaggagcggcaaaacatcgatgccactggcgatattatcgttcgcgcgctggccggcggccgcatcgactcgctgagcgtcacggttggccaaatggtcaacgtcggcgacagtctgctgcagattctcccgcaaaacatcgatcgctatgccctggtgctgtgggtgcctaacgacgccatcccttacatcgctgccggtgatcaggtcaatgtgcgctatgacgcctttccggcggaaaaatttggccagtttgccggtacggtgtccgtcatctccaaagccccggcctcgccgcaggaaatgctgacctatcagggagcgcccaaagcggcgctgaccgccgccgtgccgtactacaaagtgatcgtcatgccggagaaacaggccattgcctatgacggtaaacgtctgagcctggaaaacggcatgaaagcgcaaagcaccctgtttctggaaaaaaggaagatttatcaatggatgctgtcgccgttctacgacatgaaacacagcgcgacggggccggtcaatgagtaggaccacattcaaacaacgggtcagccagctggatctgcggctgcgccaccgggttccgatggtacaccagaccgagtcgtcagaatgcgggctggcctgtctggcgatgatttgcggctactacggcaaaaacatcgacctgattgcgctgcgccggcagttcaatctgtcatcccgcggtgccacattggttgggctgaccggtatcgccgaacagctggggttgagcactcgccccttgtcactggagctggacgaacttggcgcgctaaaactgccctgcattctgcactgggaattcaaccattttgtggtgctggtcagcgtcaaaggccgccgcgcagtgctgcacgatccggcgcgcgggcggcgggcggtcagcctggcggagctgtcgcacagtttcaccggcgtagcgcttgaggcctggcccggcagcacctttaccgccgacagcgttcgccaccgcattcacctgcgcacgctgattggcagcgtacacgggctcaagggggcgctcggcaaaatcttttgcctgtctctggtattcgaaaccatcaacctggtgatgcccatcggcacgcagctggtgatggatcacgccattcctgccggagatcgcgggttactgtcgctcatctgcgccggattgatgctgtttatcttgttgcgggctgccatcggcatggtgcgggcatggtccggactggttatgtcgacgcttatcaacgtgcagtggcagtccgggttgttcacccatctgctgcgactgccgctcggttactttgaacggcgtaagctgggtgacattcagtcacgcttcggttcactggatacgctgcgcagcactttcaccaccagcatcgtcggcgccatcatggacggcatcatggtgattggcgtgctggtgatgatggtgctgtatggcggctggctgagtggggtggtgatcgcgttcaccgcgctctatgtgctgatgcgactgctgacctacggctattatcgccagctgtccgaggaggcgctggtgagagaggcgcgggcaggctcgtattttatggagacgctgtacggtatcgctaccgtcaagatgcagggcatggcagaacgccgcatcgctcactggctaaaccttgaaatcgacaccatcaacacgggtatccgcgtcacccgaatggacatgctgtttggcgggatcaacaccttcatagcggcgtgtgaccagatcgtcattctgtggttgggaaccagcctggtgatcgataaccagatgaccctcggcatgttcgtggcgttcggcgcctttcgggggcagttctccgaccgtatcgggtcgctgacggagtttttgctgcaactgcgcatgatgagcctgcataacgagcgcattgccgatatcgctctgcatccgcgggaggcgcgtaaacccgataacccttacacggcgggcctgcaacctttgggattgacgacccatgccctgagctatcgttacgacagccagtcaccggctatctttgatggcctggacatcagcgttgcgccgggcgaaagcgtggccatcgtgggcccgtccggggcaggcaagaccacgctgatgaaggtgctgtgcggactgtttaccccggattcagggcgggttgaggtgaacggcgtcgatatccgccagctcggcatcaacaactaccacaaaatgattgcctgtgtgatgcaggacgacaaactgttctccggctcgatccgggaaaatatttgcgggtttgcggacgaggtggacgatgcctggatgcaaacctgtgcccgtgccagctatctgcatgacgtgattttacgcatgcctatgggatatgaaacactgattggcgagttgggggaaggattgtccggcgggcaaaaacaacggctattcatagcccgggcaatctacaaaaaaccggctattttgtttctggatgaggccaccagcgcgctggataaggagagcgaagctgtggtgaatcaggccatcaagagactcaatatcactaagctgatcattgcccaccgtgaaacgaccattgcgtcggcagatcgggttatacatttgggataaggggggatatcacccgcggcaccggccattttcactgttcccccctaaaaacccaataaatggcgatggggcaaggctatttttgctgctcgcttcggctttcaatttacggcgcggcgcattgcgcgatattctggttttctgatgggctgacggcggatgagggaaccatgatagacagccaggcgtttgaacaacaaagcctcgacaatctgctgagctattggcggcgccatcgccgcctgccgggcgcgcgctatccggccggcccgaccgacaccctgtgtgacgtgccgggcgtcagcgtcgggcatcacacgctggccgacggcgaatgccagaccggcgttaccgccatcgtgccgccgggcgatctgtttaaccagccgctgccgtgtggtagcgcggtgatcaacggcttcgccaagccgctggggctggtgcagctgaacgagctgggggtgctgcaaacgcctattctgctgagcaacaccttcgccgtcggcacgctgttcaacgccatggtgcggcgcagctgtctgcgttacccgcagatcggccgcggcagcgccaccattaacccgctggtgctggagtgcaacgacggctacctcaacgatattcaggcgatggcggtgcgtgaggagcacgtcttcagcgcgctggataaccattccacccgctttgcgcgcggcagcgttggcgccgggcgcggcatgagcagcttcggcttgaaagggggcatcggcaccgcctcgcgctattgtcctgggctcggcaccacgctcggcgtgctggtgttggccaacttcggcaccctcgactcgctgacgctgagcggcgtgcgcgttggccaggcgctgggcaagctgttggcggatccgccgccgcaggtggacgccggttcggtcattatcatcatcgcctgcgatcgggcgctggacagccgccagctgaaccgcatcgcccgccgcgcgggcgccggtttggggcgggtgggcagccattgggggcacggctccggcgatatcgcgctggcgttttccacccggttgctgggggcgacgttgccggacgagcggctggagccgctgtttgcggccgccgcggacgccaccgaatacgcggtgttggatgccttgctgagcgcggaaggcgtcagcggtttccagcagcacgatcgtatggcgttgggcccgctgctcgatcggctggcggcaaattaaataacgggagtgtgatgtgaaagtctttatctctgcggatattgagggtattgccggcgtgatgcggccggagcagtgcaacccggctcatgctgactatgcagcggcgcgcgagctgatggagcaggaggtcaacgccgccatcgacggcgcttttgccggcggcgccaccgaggtgacggtggccgacagccacgccatgatgcagaacctgcgcgccgatcgcatcgatgcgcgggcgcgcctggtgcagggcaaaccgcgcgggctatcgatggtggaagggctgcagcatcaacgttacgacggcctgatgtgtatcggttatcacagcgccgccggcgaacgcggcgtgctggcgcataccatcaatggccgggccttttaccgcgtcagcctgaacggcgaggtggtaggcgaaagcgatctgtatgcggcggcggcggccgagttgaacgtcccgctgtggctggtgagcggtgacgacgagctgcaacgctggatcgctgaacgttatccgcaatctggctatgtttgcgtgaaacgcgccatctcgcaaaccgccgccgaatcgctcagccctcagcgggcgcgggcggagatccgcgagcgggcgatgcagcaggtgcgccagggcgccagactgccggtggagcgccgcttcatgccaccttaccggttgacgctgatggcggccaaaccggtgctggcggatctgttcagcctggtgcccggcgtgcagcgccaggacgcgctcaccgtggccttcgacagcgacaacatggcggcgcaaatccgcctgctcagcgtcttctcctctctggcgacgacgcagagctgactcccggtgcgggttcccgcccgcaccgcacgattctccaacagaaaatcccttatcaagattaggcctgctgaataataggctacgctaattattgctctgttgcgctatgtcacctgaccggcgcggcaagccattcccataacaagagttgttttgccgaaggcagtgacgccttcggtttttttggagtcatgagcaatgagcatatcccaagttccgctttcgcggcggcggtttatcgtcggcgccggggcgttggtgatcggcgcctatctgccgtccaccggcgcgctggcgcgctcgaacgccccggccgcctccggcacggcggcgttagacgccaacgccttcgttcagattggcgccgacggcgtcgtcaccgtcatcagtaaacacaccgaagtgggccagggggtctataccggcatggcgacgctggtcgccgaagagctcgacgccgactgggcgcaggtgcgggtcgtggccgcgccggtggacaccaatatctacaagaacctggcgttcggattccagggcaccggcggttccagttcggtggccaatgcctatgagcaaatgcggcgcatgggcgccatggcgcgcgcgctgctggtgcaggccgccgcgcagagctggaaaacctcggcgcaggaaatcaccgtgcaggcgggcaagatccgccatgccgccagcgggcgagaagcgggctttggcgagttcgccgcgctggccgccacgttgccgccgcccgatcccgccagcctgacgctgaaggacccggccaatttcatcctgatcggcaaaacgcgcggtttgcaccgcgtcgattcgctggcgaaaaccaacggcagcgcgcagttctcgcaggatatccacgagccggacatgctgaccgtcaccatcaagaaaccgccgcgtttcggcggcaaagtggcgaccttcgacgccgagcgggcgctggcggtgccgggcgtggtggcggtgaaacaggttgccaccggcgtggcggtttacgccaaaaacacctgggcggcgatccaggggcgggaacggctgagggtcacctgggacgatgcgcaggccgaacggcgcaacaccgaggagatctacgccgagttccgccaggtggcgcagaaaaccggcgtggtggcgaagagccacggcaagccggacgaggtgttcgataaggccgacaaggtgatcgaggctgaatacaccttcccgtacgtcgcccacgcgccgatggagccgctggacggctatctgttctgggacggcgagagcgttaaggcgcgctacggttgccaaatccagacgcttgaccataagcagctgtgcgatctgttcgagctgccgccggagaaggtgcagattgaaaccattctggcgggcggcagcttcggccggcgcatcgatttaggcaacccgacgctggggccggatctggcggccgacatggcggcggcggccaagggcatcggccccggtcacggcgtgaaggtggtatggacgcgcgaggacgacatccgcaacggctggtatcgcccgatgatcctgcaccgcctgcgcggcgccattcgcggcggcaaggtggtgggctggaccgataccgtggtcggccactcctggacgcgccacagcgcgatggatgcgctggtggtcaacgggctcgatcaaatgatggtcgagggcgccagcgaggtgtcatacaccttcgaagccttccgctgcgatgcgcacatcgtgcccggcaaggtgccgaccacctcgctgcggtcggtcgccagcacccacaccggccacgcggtggagagctttatcgatcagctgttgcaggaaaccgggcaggatccggtcgaagggcggctggcgctgatgggcgatgcgccgcgcgcggcgggcgtgctgcgggcggtggctaaagccgccgactggcagggcgccaaggtggtggacgggcgcgcgcgcggcgtgggcgtcgccaaggcgttcgatacctatgtggcgcaggtggctgaggtgtcgatcggcgaaggcggcatcccgaaagtgcataaagtgtggtgtgcggtggattgcggcgtggcggtgaaccccgacgtgatccgcgcgcagatcgagggcggcattggttacggcctcagcatggcgctatacggcaatatcacgctgaaagacggcgtggtcgaacagtccaatttcaataacttccgcccgctgcgcatcgatgagatgccggagatcgaggtgatcatcgtgccctcgaccgagaaaccgaccggcgtgggcgagctgggggtgccgaccatcgccccggcggtcggcaatgcgctggcgctgctcgggcggccgcgcacctcgctgagcctgccgctgcataatcccactgcgaatccggcgtctgacaaggagagaacctgatgattcatttaaccgtaaacgatcagccgctggcctttgagggcgatccgcacatgccgctgctgtggtttctgcgtgacgaagccggcctgaccggcaccaagttcggctgcggcatcgccatgtgcggcgcctgtaccgtgcatctggacggcgtgccggtgcgttcgtgcatgacgccggtctccgccgccgtcggcaagaaaatcaccaccatcgaagccgtgggcgccacgccggaaggcaaggcggtgcaggaagcctggcttgatctggacgtggtgcagtgcggttactgccagtccggccagatcatgagcgccagcgcgctgttggcgcaaagcaaggatccgagcgatgcggacattgacgcggcgatgggcggcaacgtctgccgctgcgccacctatgtgcgcattcgcgccgccatccaccaggccgccaaggcgttgggttagggagagatgcgatgagcaatgccttgaaagggctgttatggctgattatcgccgtggtggtgttggcgggaggatacgcgctgtacacgctgctgcggcccaccggcgctgagccggcggcgccgatcgccggggcgccggccggcatgaccgacaaactggcgcgcggcgagtacctggcgcgcgccgccgactgcgtggcgtgccacaccgcgccgggcggcgcgccttatgcgggcggcttcgccttcaaattgccgttcggcaccatttacggcaccaacatcaccgccgacaaggagaccggcatcggcaactggagcgacgatcagttcgtgcgtgcggtgcgtgagggtatcggcccgcagggcaacctgtacccggcgatgccgtacacctcgtacaccgggctgagccgcgacgacgtgctggcgatcaaggattatctgttcagcctgccgccggtgaaacaggccaacccgcaaaacgagctgtcgttcccgttcaaccagcgctggggcatgaaattctggaacctggcgttcttccatgagcagcgcttcgcgccggatctcaacaaggacgaacagtggaatcgcggcgcctatctggcgacggcgctgggccactgcggcgagtgccatacgccgcgcaatctggggttcggtcttaaccagagcaagcacctgagcggtgaagtggtgcagggctggttcgccgccaacatcacgccggacaaacagaccggcatcggcggctggagcgaccagcagctgtcgcaatatctggctaccggccatgcgccggggcgcagcagcgccgccggcccgatggcggaggcggtggaaaacagcctgcagttcctgacgccggaagataatctggcgctggtgaaatacctgcgcgacatcgagcctatcgccggcgacggcgcggcggcggtgaacctgcagccgaagggcgcgggggcttccacgccgatcctgccgggcgggcaagacagttcgcttgggcgccgggtgttcgccaacgactgcagcggttgccaccagtggaacgggccgggccgccagagcgagtacgcatcgctggtcggcagcacggcggtgaacgatccgcaggggcgcagcgtggtgcaggccatcctgaaggggacgagcatcagcgtcggcgagcggcatgagatgatgccggcgttcggcagcgcctattccgacgaggaagtggcggcggtcgccaactttgtggtcggccatttcggcgacaagcagggcaaagtcaccgccaagcaggtagcggagcagcgtaagcagtaaagaaaagcggcgagggagtttctccctcgccgtggcgtcagcggctgcgccgcgacatcacccgtttgtctttcggccgatcctgccagtcttcaacctggttattgaagttgtccgccagcaggtaggccggggttttcgccagccagtcggacaacgaaatgtcctgatagataccgttgtccatcacgatcaataccttcaaatcctcatcgccgatgttctcgatgtaatggccgaagccctgcggcacgtagccgacgtccgaaggggcgtactcttccgtctgcgcgtggccgtgcgagctgaacaccgtcattcggcctttgccggaaatatagtattgccattcgttggcattggggtgccagtgcaattcccggatcgcgccgggtttcacgatctcgatgatgccggtcatggtggtggagatggggaactctttcgacgacaccaaatggacgctgcccgcgtcattttcaaagaacggtttttgcttcattaattcataacggtgggtcagcggggcgttatttaatccgccgtcgtttttcggcaatggcaaggcgggcggaacggcgccgccgacaatataagcttcaccctgtttggccttggaaaataccgccgccggcatgttgacgcttttttccaatacctctttcggcatatgcgccacccaatcggtgatgctgaaggtgccgaattcggagaaatggccgttatcgaacgccaaaataaaatgcgcgccgtccgccaacgcctgaatggaatggccgtaaccttttgggaaataccagacgtcgccgggcccgaaatccgccacttcgcatttgccctcgggatcgagaatggtgatgcgcgcatggccctccagcataaacgcccattcggcggcgatggcatgccagtgcagttcgcgcacgccgcccggttccagcgtcatgtcgacgccggccacgccctcggagatcgggaattgctcgacggtggcttcgcgcgcccagccgctgggcaggctgcgctttttgctatcggtgaatttgtatttatagagatgctgcgcatcggcaggcggctgatagctgctggggggcacgatattgcgatggtcgtcggcagcggcatttttggcgatgccgccaatcatgccggcggcggccgcgctgacggcggagactttcaatatatcacgacgcgatagcatagcattttctccaatataaagccgtgcgcctgcagaagcaggcgacagggaaggcgcgatcgccattgaaatgattcttgtcatcggcgggaataggctgtgacccttaaatcctagcggctggaaggtattgcgtaggcgcttatttgtttgcgtttgttactaagtgagtgcaggtttaattaattaaacggaagttgaatagtcattgggtgggattaattttagtcgccggctaatttaaataaataataaacgaacgtcattttttattggccgttcgggctatttttatgactgccccacggtctccagcaccagttgccgaaagcgctcgacgatcggcgaggtcggactgcgccgtagcgccaggtaaagcggggcgctcagctgcgcttcttcggcgagagtgcggtagacgatgccgtcgccgcccagccgccgcatggaaccgggcacgatggacacccccaatccggcgccgaccaggctgagggtggccggcaggcgcggcgcttcctgcacgatgcgcgggctgaagccggcacggtggcaggcggccagaatggcgtcgtacagcccctggccggccgggcggcgatagagaataaacgcctcgtgggccagttcggccaacggcagcggctgctgcgtctcatgcgccagccgatggcccagcggcagagcgacgatcatcggctcgctgagcaccggctcgacgctcaggccgggaatgccgttggccggcgagcgcacgaaggcggcgtcgaggcgctgttccagcaacgcctccatcagttcgccgctgccggcttcttccagttgagtggtgatgcccggcaggatgtcgcggtagcggcgcagcaggttgggcacgaacgggtgcagcgcggcggaactggtgaaaccgatagcgatatgaccctgctcgccacgggcggcgcgctgcaccgcttcgcgcaggcgttcggcgcgcgccagcagggcgcgggcttcttcgaacagcacaccgcccgcttcggtgacgcgcacgccgcgcggcaatcgctgcaacaatttcacgcccaattcatcttccagcccctgcaacaggcgggtcagcggcggctgctggataaacagccgctcggcggcgcgggtgatgttgccttcttccaccacggtgacgaacgcccgcaggcgacgcagttcaatcatagccatacctcaaaggtatctttcgttgttccggaatgcattagacatcatggcacggcggcgcgcatgataccagacatcaaaacaagcgatgtggaacggcaatgtcatgtcagatatcaatacgataaaaccgcacccggcggcagcgccgggcaacgcggcgctgtttttgggctttctgtggctggggttgatcggcttcggcggcgtactgccgatggcgcgcagcatgttggtggagcgccggcgctggctgagcggcgaacagttcaccgagctgctcgggctgtgccagtttctgcccggcggcaacgtgatcaacctgtcggtggcggtgggcatggagtttcgcgggctgcgcggcgcgctgtgcgccttgttgggcctcatcagcgcgccgacggcgattgtggtggggctgggcgtggtgtacgcccgcttccaaaacgatcctcatgtgcagcatgtgttcgccggtctggccgccgccgccgccgggttgctgctctcgaccgggattaagatgctgctgccgctgcgcggcaagtgggcggcgctggcgattgtggcgctggcgctgatcgccattgcctggctgcgcctgccgctgctgccgaccatgctggtgctggcgccgctgagcattctgctgatgtggcggtggccgtcatgagcggggtgttgatggcgttggcgttgattttcaccgagctgtctctgctggcgttcggcggcggcatgaccattctgccggagatgcagcggcaggtggtggaggtgcatcagtggatgagcgcccaggagttcagcgcgctgttcgccatggcgcaggccgcgccgggaccgaacatgatgatcgtgccgctggtcggttggcacgtcgccggttgggcggggctgctggtgtcttcggtcgccaagttcgggccgtcttccatcgttacgctattggtgatgggcgcctggcggcgctttaaggatcgcccgtggcgccgcatcgtgcaggccgggctggtgccgctgaccgtggggctggtggtggccagcggccttttgatcgccgaggcttccgcgcccaattggcggctggcggcgatcgtggcgctggcgacgggattgagcatgagcaagcgcctccatccgctgtgggtgctggccggtggcgcgctgcttggcttgctgttcgcctgaaggattagcgcgggatcagcacaaagcgcgaagggccgttgcggtcgatcagctcatagcgcttcggcgcggtcagggccagaaacgccaccatactcccttcggcgtcggtcagcgtcatgccgtccggcgttggccgccaggcgaccggcagcgcgtgcagcgccagcggctgcaggcattctgctgaggcgctgaagcggaaggcgttggtattggctaccgcttcgtcgctcagctgcacctcgcagacggttttaccgtcgccgatggcggcgagctgccagtcgcccttcagcgcggcgggttccagcaacggcagtgaactgcccagggcactgctgcacaatacgctcataatgactcctgtcaggctggcgcggcgcaaggcgcgcataaggaaatgggttggcatcgggtcactcctttcggctgtccgttcacaccttagcacgttcccggcaggatgatgaggcaaggattaggttttttaatcctcgataattctgatctaaccggcgataacatgcccaaaaagacgagtcattagcccgccgatacgcttatctttctcattaatactgcgctaatacaaatcgttatgattatttccgccttaacgcccggcgcggtgatgcgcggcggcgtgggctcgcgccgtcggggttaattactatactggtcaatcctaagccttggcttagattagaacgactgatgaatagtcttacaaagcgagtggattcctactgtgtaaaaggagaatgcaatgagcagtcgccacaacgacattttgcaagatgacgatgagttcaccagcctggccgccacatcccccaacgatcacaactatcagttttactatcaccagcccggcagcccctatgacggattgggctacggcgcgctgttcacgctggacaacgctaacctgtacagcaaccagcgcggcggggcagccatcaacaacctgggtaaaatccgcgataacttcagcttcgatcgcgccgccgatcagctgacgcggccgggcctgacgcacaacggcgatcaggtgtatcaccagccggtggcgctgacctattcctttctgacgcagagcgcgctgaaccgcatcggccagaccggcgacggtgacaaggggctgcagccgctgaccctggcggcgcaggctcaggcgctgaaatcgatgcaggcctgggccgatgtggcgaacgtgacctttaccgaggcggcgtccaccgatatcaaccaccgtgcggacatcaccttcgcgtacttcacccagcgcgccgacggcagcaccgccgccggcagcggcccgaatgccatcaacgcgtacgcctattatccgccgagctccaaagcgggcagcgataacgccttcgccggcacggtgtggttcaacaaaaacttcgccacccataaggcgccggttagcggcgacttcagcagccagacctttacccacgagctgggccatgccctggggctggcgcacccgggatcttatgacgcgtcgctgggcaacccgagctaccagaacgatgccgcctattatcaggattcgttgcaatactcgatcatgagctatttcaacgccggttacaccggcgccgacaccaaaggggtgtacggctatggcccgatggtggatgacatcgccgcgatccaaaaattgtacggcgccaacatgagcacccgcaccggcgacacggtgtacggcttcaactccaacaccgggcgcgatttcctgaccgccacggcggacaacggcaaaccggtcaacttcgcggtgtgggacgctggcggcaacgacacgctggacttctccggctacagccagcagcagatgatcaacctgaacgacggcgcgttctccagcgtcggcggaggcacgcagaacgtcgccatcgcgcgcggggcgatcatcgagaacgccatcggcggcagcgggcgcgatgtgatcatcggcaacgatcaggacaacctgctggcgggcaacgccggttccgatatcctgtacggtgggctgggggcggatcatctgtggggcggcaaagacgccaacaacttcaccgactatttcgtctatctcaacgccaaagagtccacggtggcggcgttcgacgtgattgaagacttcgagcacggcatcgacaagatcgatctctccggcctgcgcttcaacaacagcctgagcgagctgcgctttatcgacagcggcagcgccttcagcggccagaaaggcgagatccaactcaacttcgacgccttcaacggcactaccgatctgttgatgaacacccagagcaacagctacgccgccgacttcaagatccacgtggtcgggcaggtggagcagagcgatattctgtttgcctgagggcgaggaaggaaaagagaaaagggccgaacggccctttttttacggctgggccgctgcgctttccaccgtgaagtcgccggtggccacctcgccggcgcggcggtagtgggccacgatcacgccgccgggcgagaccaccgattgggtcagcgtgaaggccgccggcgcggcgttgtcatcgaacagccgcttgcctgcgccgagcaacaccgggtaggtaagcaggcgcagttcgtccaccagatcgttggccagcagctgttgcatcagggtgctgctgccctgcaccagcagcaccggcccctgggcgcgcttcagctcgcgcagccgggcgatgatgtcccgccccagccactggctgttctgccacgccagcgtctcgccgtgatgagtggcgacgtatttgaccgcctgattgaacgtgcgggcgatatcggccgaaaacgggtcagcctcatcggtgatctgcggccagtaaccggcgaagatatcgtaggtgcgccgcccgagcagcaaatcaaaaggcgccgagaaaagatcgctcatcgtttccgcgacggcgtcatcccagtagggggcggtccaaccgccgaagcgaaagccgccgctgcggtcttcgtcctgcccgccgggcgcctgcatcacgccgtcgaggctgacgaacgcgctggcaataatctgtcgcatggctgtctcctgcaattgagtgccagctgaaagtttagccgccgtgcagcggccgcgccaaccggccgctcagggttgcagcgccttgagcagcgcctgatggaaacgctccggctcctccatctgcggcgcatggccgagcccggcgaactcgatcagcgtggcgtgcgggatcagtttcgccgcctgtttgcctaacacatcataatgcccgattttggccttgaccgccggcggggcgatatcgctgccgatggcggtggtgtcggcggtgccgatcatcagcgtggtgggcgtttgcagatccttgaactcgtaatacaccggctgggtgaagatcatgtcgtagatcagcgccgagttccacgccaccaggcgatggcccggcccgttgttcagcccggccagcatgtccacccagcgatcgtactccggcttccagcggccgccgtagtaagtgtgctgctcataattgcggatgctctcagcggaggtgttcagctcgcgcgcgaaccactgatcgatgctgcgccacggcacgcctttcgccttccagtcctcaaggccgatcgggttgaccatcaccagccgttccaccgcctgcggatacatcaggctgtagcgcgtggccagcatgccgccggtggagtggccgatgacgatggccttgctgatgttcagattctgcagcaggccgtgggtattttgcgccagctgctggaagctgtactggtaatgcgccggcttggtggaggagcaaaagccgatttgatcgggcgcgatgacgcggtaaccggccttgctcagcgccttgatggtgtcctgccaggtggcggcgcagaagtttttaccgtgcagcaacagcgcggtgcggccgttggcggtgccttccggcggcacgtccatatagcccatttttaacggctgcccctgcgaggtgaagctgaactgttgcaacgggtaggggtagtgaaagccctgcagctccgggccgaacgttggcgtttcggcggcaccggcggcgaacgcggccagcgcggcgcacagcagcgcgctacgggtgaatctcagcatcctgatctcctgaaaaacggacgaaagccgagtatagccataatcggcgcggcggcgcgccagtggattcagataattctgtaatatgacggtttgattcccggccagattccggcaccgctcttttgcacagtgaacgcggtcacgccgcgcaacattcgccgtatctgatggttttatttcaaggctaagttatgcgatgcttaagcattatttatgcaaaaggatcctcgcatgtccgctttatcccgctgcgctttcagcgaaggcagcgtcgctttgccggaaggctatgccgatcgcacggtcaacgtcctgttggccggcgatgatgtttccccctcagtcaatatttcccgcgatgcgctgcagccggcggagagcctggaaagctacgtcacccgccagcttgatgcgctggcgcaggggctgaaaggttgggcgttcaaaagccgcgagccggcgtcgttgggcgatgggctggccgccggtgagtgggtacgcgccagctacctgcgcgacggcaaacgcatctggcagaaccaggcggtgttcgcgctggcggagggccgggtgctggtgttcaccctggcgatggcgcgcaagctgacgccgcaagacgacgcgctgctgcagcaggtgctgagcagctaccgggcggcataacgatgaactctttgcgtaaaaggaacttacgatgaccgaagcggcccgcgtcggcgataccatcgggcactcccatgccctggccggcatgattgccggcaccattgtcggcggcctgatcgccgccgcaggcgcattggcagcgggggcgctgttcgtcgccggcctggcggcttcctgtatcggcgtcggcgtgctgctcatcggcgccagcctggcggtggggtatctcaccggggaggcggccaccgcggcgcgtgacggcattgccgacgccggtgccggtagcctgacccccaaaggcaatatcgtcaccggctcccccaacgtcttcatcaacggcaaacccgccgcgctcgccaccaacagccaggtggcctgcagcgacgacggcccgagcatgcagatggcgcagggctccgacaaggtcagcatcaacggccagcccgcctcgcgcgtgggggacaaaaccaactgcgacgcgcaggtgatggaaggttcgcccaacgtgtttatcggcggcggcaccgtcaccaccttgccgatcaagcccgaagtgccggattggctgtacaaggtctctgacctgacgctgctgttcgccggcctggtgggcggcgtgggcggcgccgccggcaagctgggggcgctcggcaaactgctgggcaagctgcccggcatcaacaaactggcgcgcatcgcctgccgcgccggcaccctgatgaccgccaccgccgcggtcggcattatcgcccggccggtggatatcgtcagcggccagaaattcctcgacggcgaagacgatctcgatttcgtgctgccttcgcgcctgccggtcgcctggcagcgctattggcgcagcggcaaccccggcgacagcgtactgggccgcggctggaacctgttttgggagagtagcctgcagccgtatcaggacggcctggtgtggcgtgcgccttccggcgacttcgtcgctttccctatggtgccgcgcggccacaaaacctactgcgaagccgaaaaatgctggctgatgcacaacgacgacggcagctggcagctgtttgacgtcggcgaacagattttccactacccgccgctggcgggcgaccagccgagccggctcagcatgatcaccgacgccatcggcaacgccacctcgctgttctacgacgacgaggggctgctgagcgaactggtggacagcgccgggcagcgcctgatgtgccgctatgcacagggccgtctgcgcgaagtggcgctgcaaaccgccgacggtgaacgaacgctggcgcgttatggttacgatgagcagggccagctgacgacggtgagcaaccgcgccggtgaggtgacgcggcgctttggctggcgcgacggcctgatgatcagccaccaggacgccgccgggctgctgaacgaataccaatggcaagagatcgacggcgtgccgcgcgtgacggcctaccgcaacagcgccggggaatcccttgagttcggttacgacttcgccggcgggcgccgcagcgcggtgcgcggcgacggcaaacgggcggagtggcggctggatgacgacgacaacgtggcgcagtacaccgatttcgaccagcgccgctacggttttatctaccaacgcggcgagctgtgcagcgtgctgctgcccggcggcgcgcagcgccagagcgaatgggatccctacggccgcctgctgtcggagaccgatccgctcggccgcgtgacgcgctatcaatattcgcgcaacagcggccggctgttcgccgtcgcctacccggacggcagcagtgaggcgcagcattgggacacgctggggcgcccgacgcgctatgtcgatgcgctgggcaatgccacgctgtaccgttatccggatgacgaagagagcctgcccgctagtatgatcgacgcgctgggcggggaagtgaagctggagtgggacgcccgcggccagctgacgcgctacaccgactgttccggcagcgtgacggcttatacctacgatgcgctggggcaactgacggcgcagaccgatgccgaaggccatcagacgcgctacttgtgggataacggcggccgcctgcataccctgatccacccggacggcggcgaagagcgctttaactggaatgcgcacggccagctggccgagcatcaggacgcgttgggcagcctgacccgctggcagtacaacgccctggggctgccggtcagcatcaccgatcgcatcaaccgcacccggcgctatcactacagcccgcagggctggctgacacggctggagaacggcaacggcggcgaataccgcttcagctacgatgcggtgggccgcgtgctgaccgaagagcgcccggacgacacccgccacgattatcgctacggcgcggccgggctgctggaggagcaccgcgaggtcggcctgccgggcagcgcaggtgagctgacgcagcgcgaacagcgcttccgcttcgacgaggcggggcagctggtctggcgcggcaacgccagcgcggaatggcattaccgtttcgacgccatggggcggctgcgcgagctgaaccgcctgccgacggcgagcggcgcggcgctgggcatcgagccggacagcgtgcagatgcgctatgacgccgccgggcggctgctcggcgaacagggcgtgaacggcgagctgcaataccagtgggatgcgctggccaacctgcaggcgctgacgctgccgcagggcgatcgcctgcagtggctgtattacggctccggccacgccagcgccatcaaattcaaccagcaggtggtgagcgagttcacccgcgatcgcctgcaccgggaaaccggccgtagccagggcgcgctgcagcagcagcggcgttacgacgccatgggccgccgcagctggcagagcagcgccttcggccacgataaactgacccggccggaagacggcgtgctgtggcgcgcctatcgctacaccggccgcggcgagctggccggggtgagcgacgcgctgcgcggcgaagtgcactatggttacgacgccgaaggccgcctgctgcaacaccgcgaacccaatcagggcaaaccgggcgcacggctggtgtacgatctggcggataacctgctgggcgaacgcagcccgcagagcgacatcgacgcgcacctgccgctggcgccgatcgccgacaaccgcctgacgcactggcaaaaactgttttaccgttacgacgcctggggcaacctgatcagccggcgcaacggcctgtacgaacagcactaccgctacgacgccgacaaccggctggtgcaggcgcacggccgcggcccgcagggtgagttcgaggcgcagtatcattacgacgcgctgggccgccgcagccgcaaaacggtgcgctataagggcaaaaccgaacagacgacccgtttcctgtggcagggctaccggttgctgcaggagcagcgcgacgacggcagccgccgcagctggagctacgatccggccagcccgtggagcccactggcggcgctggagcaggcgggcgacagccgctcggcggatatttactggtatcacaccgatctgaacagcgcgccgctggaagtgaccgacgcagcgggcaacctgtgctggtccgggcagtacgacaccttcggcaagctgcagggccagacggtagccggcgcggcgaagcggcagggcgtgcaataccagcagccgctgcgctacgccgggcaatatcaggacgacgaaagcggcctgcactacaacctgttccgctactacgaacccgaggtggggcgtttcaccacgcaggatccgatagggctacgcggcgggttgaacctttatagatatgctccaaatcctttgggatggatagatcctctaggacttagtggcttaaatagccttcagcaacaaattgatgagattctattggaacatcttcctgctatacagaagatagatccaaacgcaaccgttggatatagaggtagtgctgcaagtggaataagtaagtcccatgatcctgcgattgctagacctattaacatgaatgatttcgatgttgatggatttattaagtcggattacttagctagttcacctgagtttaggaacagacgccgggacgcatctaagcttggggggatgaaatcaatagaggagtctatcgattcgaagttaaggcagaaattcccagggttaagaaatgaaccatttgggtttagggtgttctacacccatgagttagatgatctggctagaaaaggcgacgtccaaagaaggttagggcgttccggatgttcatgaaatggagaatggctgtgaacgagaataggcaattaggtattttattattggaagacattccatttgataagctgcttattaagctggaaagggcgtttggtgtttcacttccttgtgaagatgataaggggcgctatgtggcaaaagcagaactagatgattataatatagaggttatagatagagttgatagattaggggatgttctttgtgatgataatcatgtgatcgacgtgaaaataaaatctaatgatttttttaatccagactttgagagaaaaataaaaaaaatactaagagatggagatgtgaagtggaaggatggaatttggactaagcttcatagggatgaggattatagagtcgtctatcctgactcttagtgttcacgttaacaatgtaaccatttctaaatctgcgttagagccgacaattctcagtcggttctaaatatctagagtaaaaaagtatctaaaagcaggtttgataattttgaaatatccatccataaacattgataaatcattttatattacggtatctaacatgattgattttaacgctaggattgtgtctggtgtttccatagggaatgtcgttctaaatgaaaatatttcattatatattaatgagatgcaatccagatttagcgttaagattaaaaatcactccctacctgacgggagtgagcgaaagtcatatacagtcgataataccttatccgtcataactgataaagacggtgtcattttgtcacttggatgtaatgctcattaccaagggggctacaatggaatcatattccccggaatggaaataacagatataatcaagctgacgatatcacagaaaatatacaatagttcaatagttattaatgatgactttggtatttcgtttatcctcccatgcccatatgatgagattgccgatgcgataaacgatattcctggcggggtgataataaacgaaattttcgtatctgatttttcattctggcgttagcttatggaacatatgagtgaatttagtgagaatataattaaatatggggtggtgatataattgttactggctacatagattcggatacaccaccgttttttcatccgatgtatgacagggtttactttatatccggtgaggttatatttgaattttacattgatgatgatggggttgttaattcacatttagttgaaaacatctctccgtggtttgaagtagatgtggatgatcaattttacatgatgtcaatctattcacaagcttttaaaactgaacgggaagttaaaataattgcagtgaattatagtgaagaaccgttctcagtgttcatcgtcaggtataaagatggtgacaatgaaaattcactgtattcaatgaaaattcactgtatttagagccaaagagttttttgactttttgatttcatagaaaaaaccatggaatgattaggagttcaatgtgagcaaggaattaaagcttgatgttatgaataacaaaaatgacttgattgaagggactttttgctactcgctttttgagaggtcgttctttgatgaaaatctgttaagtgacttaataaataattcaggggcgtttttaaaagaaaacgaatgtgataaggatgttttaaatttgctatcatgggttgtcaatggtgttgatcagtgttttacttcccatagtgatgaaaatgactattatttaattgaaaactactctgtggcattggaaaataggtgggtgcttttttggcggtcaaaaattgataaaataattggcgggaagtaaaatggatatcaagaaaatacaagagaaatgggtgcgtggttagttaattggagtggacctcattgcaagtgaaaacaatacagcaagagagataaatatttactctgaagaaagtgatggtttcaaaaatacttttaataaggagtatggcatttcatatgggagtgttatttcgttaagctcactcattaagaaacgtgatgatttgtggtctgaaattcaaataaacaacaaggtattgcttcctgatggtgacgttttattttgcggggagggcgaaatggggagtgatggttttattgtcagagcagataagtataataaattgaaatggttcatgtactctacgacctctaacccatttcttgatgttataaggttaaacggtcggctgcatataaaatccacgttgggtttttatcttgacttcggtatcgctgacaatgatatttttctgagaaataaatgagtgatatttttctaattgacatcattagtattaagcctaataataaatgaatttttaatttgatggaggttaccaatgattaacaaatctagtctggttgatggtatcctttttcgggatgagaatgactcgaatgaaactgtagttttcaatttttatacttgggtggaaatgctcaaagcgatcattgttaaatatgcgcaaaagtctgaaagtgacgcggagttattggttttatcatcgagcttagtgtgcaagcctatcaacagttatacggctgtctgtctcaggagccatgaaattgaatatcattgggcaatgctgatagcttatggtgaacagtattggctgaaaggcgtagaatccaaacagcctgatggctactttgactgggatgtgcaacataggaaagaacataacttagcagaggaaagctttgtttttagcaattcatgaatcgcgacccgatagggtcaaacatccctccaaatgtccaacgccttccttatcctacatcccccaaactaaatacccaccgtgccattaatcagggtgcggcactgcccgccgatccagggttcgccgtcaataaagcgcacgctcacgcggccatcacgattaagttgggtgccctggcgcacctggtagccctgcgcggtccggccgccgtcggggaagcggctggcctgcagcaagcgcgccaggctggcattggcgctgccggttaccggatcttcaatcaaaacaccgcattccaccataaacgcgcgcatttcgtaatcggccggttcggccgcagaacaggcgccataaatcactacgccatccacatcacaggcggtttgcagctgtttaatcgtggcctgatccggcgttaccgccaggcaggactgcgcgtccggcaggcgcaccatcagccagcgaatgcccatctcggcaatcaccggcagagggcttgctgcaatcactgcaggccgtaaagcggccgttaaccgttcggtttcttcggccgccattgggcggaactctacttcgggcgcggcgaacgccaatgtgccttccggcaggatattgaccgccaccagaccgacgccgcattcctgcatcaccgttccagggcgtttaggcgtcaatccggctttcagcaaggcgtgggcggtgcccagcgtcgggtggccggcgaagggcagctctttttcggtggtgaaaatgcgcaccttataatccgccgccgggtgcgtcggtttaagcacaaaggtggtttccgacagattggtccaacgggccaatgccagcatctgcgcgtcgttcagcccttcggcttccagcaccaccgccacgggattgccctgcagcggcgtacgggtaaacacgtccacctgttggtaggcgcggggtgtcacatcatcacttctgagcatttgccatcatccgttatcaacaaaacctgatgataacgatatttgcaatagcttcaaaaggttgagttttgttttgagatgcccgcccgtcgccacttcatccccggcttggcgaacatcaccaggttgcccaacaggatcaggcacaggcccagcacggcgttgaaatgccactggtagccttcgtaaatcgttgagatggtcagcgccaccagcgggaacagcagggtgctgtaggccgccgcgccggcgccgatgcggccgagcaggctgaagtaggcggcgaaggcgatcaccgatccgaagatcgccagatacaacagggatccgatatagcggctgctgtattccatctggaacgatgcgccctgcgccagggcgatcagcgccattaacagcgcaccgtaggtcatggcataggtattggtggaaaaaatatccagcccgcggcgctgatggcgcgcgctgatcatattgcccagcgagaagccgtaggtgccgagcgcgctcaggccgatgcctttaagcagctccggcgccatgcgggtggcggccagatcttgccagaacagcgccacgatgccggtcaaccccagcagcgccgccggcagcagattggggctggggcgctggcggaagagcagcaggctgttgagggcgttgaacagcaccgccatcgagaagatcaccgattccagcccgctgctgatataagccgccgcatggtagaagcagaagaagttgaaaccgaacacgcagcagccctgcagcacgcagaacagatgatcgcgcggggcgatgcggcgcaggcggcgcgttagcaacagcgcggcgaacatcaccgcggcggaaatggcgaaacggtaagcgatcgacacgggaatggccaccgggccttcctgttgcagggtaatcgctatccaggtggtgccccaaatcagcaccacggcgaggtacaacagcgcattcatgttctttactccgaaaaaaccgatagcgcagtatccgctttgtcgcgcggcggcgcttgcagcgctttgcgcccagttgcatattcttgcgctttttttgccaaaagcgcggggcggccgctggcatgccgcggcgccactctttacactgtcagcatgtcgaacaacggggccggcgatgtccaactatcaggcgtttgaaacactgcgtgagcacaaggcgcggctgcacggcagcgtgctgctgggcaccggcgtggagctggcggcctggtccaactgcaacgatcgcgtcacgcaggaaaacgccgaccaccataccctgagcctgtacgtcgccgacggctatgagtgctaccagcaggtgccgggcggctggcgcaacggcggcgggccggatcgcttctgcatcatgccgcgccagtacgcttccacctgggatgtgcgcagcgatctgtcgttcgtgcatctgtattgcaccgacgggcatctgcgccggctggcggagcaaacctgggatcgcagcccggcggcgatcaacgtggagccgcgcagcttcggcgaagatccgcagatcacgctgctgtatcgtcagtttttgctcaactgcgactggcgggacagcgccaacctgctggcgctcagcagcgcctcgaacctgttgatgtcgcacctgatccagcgctacagccagctgcagtggaagctgccggcggcgcgcggcggcctggctcccgcggtagccaggcgggtgcgggaatatatcgcaagccaccttgatcggcctttgttgttggccgatctggcggcgcaggccgggttgagcgaataccattttgcccgcatgttcaaacattcgaccggcctggcgccgcaccagtttgtgatgcgcgcgcggctgcagcgggcggaacagctgttgcggcacagccaacagccgatcaccgagattgcgctggcgtgcggcttcagctccgccagccatttcagcaaccgctttaaggcggcctatggatttgctccgctgcaggtgcggcaggggcgctaaccggaagggagtgcaagcatggatcaaccatttgccgggctgggcgtgttgttcgtcgccggatgcgggccgatcacgcgtgagagcgacgagagcaaggcgttttatgtcgaggcgctggggttgccgctcaagccgatgccgggcaacgaaacctatctgctggccgagcagggcgcgctggacggggtgaagcacttcgccctatggccgctggcgcaggcggcgcagtcctgctttggcgacgatcgctggccggcggatctcgcggtgccgcaggcatggatcgagttcgacgtggccgacatggcggccgccacccaggggctggtcgatcgcggttatcggctgctggtcgccaatcgtgaagagccgtgggggcaaagcgttacccgtttgctcagcccggaagggttgctggttggcgtcacctatacgccctggctgcgttaaacgccacgccgttcgccgccgtttccctgcggcgggcggcttaagaataaatacgcattagcttaaagcgatctgcgctatagacccatcaaatccccgagtggtttcccttcctgaaagcagtaattccgttcattgcgtaaaaaccaatggccagaacgcgctattgccatgccattttacggcgatttttcgcccgcttttttcgccgccaggtgcctgataggaatagagattattcttatatttccgccaaccgttaagaaataataatgattctcgttttcaaccacggaaaggagaaggaacgatgaaaacagtgaaacgaacgggcatcgcgctggcgatagccctgactttccccctggcattgcctgccgctttggcggcgcaaaccaccctgacaaacagtaaggcggcgacgatgacggaaaaacacgggcagtttattgcggtcggtaaagtggtgcaggtgaccttcggcgatttcgccttcaagctggattttaccgatgacaagaccatgaccttcaccggtatcggcgaagcgtcgcagggcatcaccgataccgtgcagtacaccgcggtggagattcggccgaaggtctacatggtctattggcatgaaccgcagtccggcgacaacgtgacgcatgtcgaggactttgagcgcggcgaggtgtacaccaacatcgccgccagggacggcagcttcacccatctgaaagggcagctgaaaatcgtaggtcactcaggaaactaaggagcagttatgaaaaaggtattgatcacctgtgcgatcgtcggcggtttgctggcgagttacccggcgctgtcaacggatcaggcggcgtcttacaaatcggccggcaagggcggttatcatcatgcccagcagaagctgaaggtggtggaagatctgtatgcaggctttttcaaccgtcatgacatcagcgtggcgcaaaagctgattgtggagaactacaagcagcataacccgttcgtcggcgacggcatcaagccgttcctggatttcttcagccagaccttcaaagacaatccgcagtacagcgccaaaatataccgcagcgcggtcaacggcgatctggtctacgttcacgtccaataccaaaataacccgcaggatcgcggcaccgccagcgtggatatttatcgggtgaacgatcagggtaaaatcaccgagcattgggacgtcaatcaggatgtgccggaaaaatcggccaacgacaataccatgttctgatccaaaagggccgctgcggcggccctccacacgcccgcaacactttatttacttacataaataccaaacgttcatcgtgtcgagtaggctacggccgcctttggcagtggtggtacggttgatgggcgtcattgtcccgccactgcttgaggcgtttccccacattcctcgttatcccgcgcgtttattttccacttttttgaactgatgccgcagctgcagcgcattgcaaagcaccaataccgccgtgacggcgaacacccagcggaaccccatcatcgccgaaatgcccgatcccagcagcgggccaaccacgttgcccaggtacataaaggattggttatagccgaagatgcgcccggtcacctgatcggaggaatacttcagcagcagcgcctgcaccgccggcatcagcgcgccgtcggcgaaccccagcaggaagcgcagaatgcccagctgcagcggcgtattcacccaggccatcacggcgaacaggccggtggtgaacagcagcgcggcgatcaggatgcgcgcggtgccgatgcgatcgccgagccgcccgaggcgtggcgccgagatcagcgccgcaatgccgggcacggcggcaatcatgccgctaacaaaggcgatattgctgacgtcgcccgacagttcgcggatgaacagcgtcaggatcgggctgatggaggagttagccagctggatcatcagggtacaaacgaacagcgtgacgatcagcgtcggataaggcagcgaacggaataccgccttgccgcttagctgatccgcttttttcaccgtgatgcgccgttctttaatcaggaacagcgtcaccaggaagctgacgaacatcagcccggcggtgacgaaaaacaccacccgcagccccagatggtcggccatcagcccgcccagcagcggcccggcgatcacgccggagatctgcccggtagagagcgtgcccagcgcccagccgcttttatcgcgcggcgcctgcgaggcgaccagcgccatggcgttgggaatatagccggacgtcagccccatcagggcgcgcagcgcgaacagctgccagacgttggtggccagcccctgcagggcgatgacgatcgccatacccagcgaagcgcgcagcagcatcagcttgcggcctttgcggtcggcgaggctgccccacagcggcgacaccaccgccgagaccaaaaaggtgccgctgaacaccagcccggaccacaggctgagggactgatgatcgctgacgccgagctgttcgacgtacagcggcagaaaagggaggatttggctcatcgccagcccggtgaagaaacacccgagccagaccgagatcagattgactttccacgcttccatcgacttgtcgtaccactttgaatttggagggatttgttaagcaagataataataacaccgcgaactggccggcgcgggggaaatgcgtgagaaaacgtaaagctcgtcggcggcgttgttacatttcgctataaattaatagctatattatcataggtatttattttaagctactccaccaagccgctcaacaattcggcggcgccacactctctctacccatttcgccgtgtcggcggcaaggagacgctttctatgaataccgcactgatcgctctggattacatcgtggatatctcccacccggaaggaaaaattgcgcgctcggcgcagcaggtcattgagcgcgatgctatcgcgcgggcaaatagcgcattgtctctcgcgcagcgcaaggattggctgcgcatattggttaaagtcggtttcgcgaccggctatgtcgatcaacccaaatactcgcggatgtttgggcaggcgcatcaatttggcgctatcgcactgggccagccgggcacggattttcatcctgatttagcgtctgatttgggggagttaaccatcgtaaaaccgcgcgtcagcgcgttttatggcaccaatctggatgcgacgctgcgcgcccgccgcattgaacggttggtgatctgtggagtcagcagcacctgggcggtacaggcgacggcgcgcgacgcgcacgatcgcgattatcaggtgctgatactggaagaggcttgcgcggcggccacggcggaagagcaccggatctcgatggaaacgcttgccactattgccgatatcgtcacgctggaacagctgagcgcattgtgaagctgctgcgtgaagaaatcgcctggtgtcagctgcgacggggagcatgggtgttggcgccgttgctggccctgagcctggcgacaggcaatgccaactggctgaaggcttcggtggtcaccatatcgctgtttgtcgtttgtgagcgccttgaactggcgccgctcggcgtggcgctgcatgcggcggcattgctgctgctctttatggcgctgctgtgcgccatgcacacgccggtcatcttcattttggcgtgcgtgttggcagcggcggcggcggttgggatctccgcgttcggcggcaagctgcgatccctggggaattttatttttattccggctctttatctggcgtgtgaaaccgctgaaggtggcgccggcgcgccattagcccaatgcggctgggcgcagctcccttttctgggggcagccgtcttgccggtgctgatgcttgcactggcagagcatcggcggctagcgcggctgtcgacgagtgacagcctgcatcattatctccagctgcgccgcagcgatgagcttggcgctcgcgtggcctgcggcgaggctttgctcgccgtaagttgtgccgttgcactgtcggcggcgatcgttgagtggcaacacctcgattacgggcaatgggtgatctggtcggccgtcagcgtgatcagcggcgatatggccgctacgcgcaacaaactccgccagcgtgcgtcaggcgcattgctgggcgtgcccgtcggtattttgctgggtagcctcatgccgcatggcaatgtgggttatgaactgctgagcgtggtgacgatgctcaccctggtgtcttttcatcgttataccttggggtttggcgcccgttgcgcctgcatcgcctgcgcgttggtgattgcaggaaaagcgccgtcgatcgccgcagaaagggtggtcaatgtgttgctgggcggtggcatcggtctgctgttcgctttggcggtgcatgcggtgttgccgctcaacgccggcacccgccaatagcgagctggcatatttcgtccgccaatttcggttgaccgtttccggtctcggtgtgaaagtacggacaaatctatcgttatctattgatgccaatgaaaaaagatcatcctgaagacgtgacgctgctgcgcacgcaattaatgtcgctggtgcgccgtttgcggcgcgagtcgcgcagcgacgaaaaatcctgggcccagctgatgctgctgggagctatcgatcgtcacggcggcgaggcgacgccgtcgctgctggcggagtcggagcgcatgcgttcctctaacctggcggccgccttacgggagctggaggccgatgggctgctggtgcgcacgccggatgctgaagacaaacgccgggtgcgggtgcgcctgacgcccgccgggctggggctgctgcagcaaagccgcacccggcgcgaggcgtggctgctggcggcgatggaaagctgtttaacggagcaagaacaggcgcagctgatcgaagcgggggcgttgatggcgcggctggcggcggcgccgtcaacggacgcggaataatcggcggggcggcagatgcgccgcccgtgcagcgaggttacggcattggccaatcggccggcatggtgctgacgacgtccacgtagcgatcccaggccgatgaccagaattgggtgaaggcttccagggtgaggtggatgcccatcaggcccatcacgaaccagcaggcggtaaacaggcccaggctgctgaacatgaacgccatgccgttgcggctggttttacggcaaacgacgtttaactggctggcgaagaacatcatcacggcgctcagcaactcccagcgcatcatgactaaaccggtggcaatggtactcatcgaactcgatcctatgtaacaaaaagccgcatccggcagggcgccgacagggaaatgcgggggaataacgggaataatgtgattcagatcacattgtagcattggggcgaacgacggctcaatggggcgcgcggtgaaaaaaacgccgacggtaacattccaatatgctgaaacagttatgccatttcattagcaaccttttcatggggcggcgcgctcgataacgctatgcttgccggcttttcagttccctgattttacggggaaatgtgacgcaaaaggtaccggcaccgcatggccctgttaaaagaaaaaattcgcgaccactctgcggaagagaggctgtttatccgccgggcaggcgtagcgctggcgctggtggtggtctgcttcggcgcgctgatcgttaacctctaccggctgcaaatccgccagcacggcttttaccagacgcgttccaaccagaacgacatcaagatgctgccgctcgcccccagccgcgggttaatcttcgatcgcaatggcactccgctggtgcgaaacgtgacactgtatcgtgtcgaaatcacgcccagcaaaatcaccgacatggcggcgctgctgcaggcgctgacgccgatcgtcgatctgacgccggaagacatcagcgcgtttcgcgacgatatgcaccacaacagccgctacaagccggtgacgctaaaaaccgggctgagtgacactgaggtggcgcgctttgccgtcaatcaataccgtttcgacggggtgaccatcgatacctatcagcagcgtgaatatccttacggcgcccagctggcgcacgtgctgggctatgtgtcgaagatcaacgacagcgatctcaagcgcctggacaaggccggcctgagcgagaactatgccgccgaccgcaacatcggcaaacagggcatcgaagcctattatgagtcagaactgcacggcaccaccggctatcaggaggtggaggtggataaccatgggcgggtgatccgcttgctgaaggagcagccgccgaaggccggcaaaaacatttacctgacgctggatctgccgctgcagcagtacatcgaatcggtgctgaaggggcaacgcgccgcggtggtggtggaagatccgcgcgacggcggcattctggcgatggtctccagccccagttacgatcccaatcccttcgtcaaaggcatcggctatcaggcctataaggcgctgctgggcaacccggatctgccgctcatcaaccgcgttacccagggattgtacccgccggcttccacggtgaagccctacatggccgtttcggcgctgttcgccggggtgatcacgcccgccaccacctttttcggcgcgccgacctggacgctgcccggcaccgagcggcgctaccgcgactggctgaaaaccggccacggcatgctcaacgtcaccaaagcgattgaagagtccgccgacaccttcttttatcaggtggcctatgagatgggcatcgatcgcattcaccactggctgagccagttcggttacggccagtcgaccggcatcgatctgaacgaagagtaccgcggcgtgctgccgagccgcgactggaagctgaaggtgcacaaaaagggctggtatcagggggatacggtctcggtgggcatcggccaggggtattgggtggcgacgccgatccagatggtgaaagccttgagcacgctgctcaacaacggccgggtgaaaacgccgcatctgttatattcgctgcagcagggcaaccgggtgacgcgctaccagtcgccggcgcaaacggcgcagatcggcgatcccaactcgccttactggggcatcgtgcgcaacggcatgtacggcatggccaacttgccgaacggcaccggttacaagctgttccacaccgcgccgtatcagatcgccgccaaatccggcacctcgcaagtgttcagcctgaagcaaaaccagacttacaacgccaaaatgatcccggtgcggctgcgcgatcacatcttttatacgctgtttgcgccctacaaaaatccccgggtggcgatggcgctgatcctggaaaacggcggcggcgacggcgtggtggcggggccgaccgcgcgcgcgatcctcgaccacatttttgacccggccaatgcgccacagcccggcgatacgccgcaaagtaaaccgcagttaaacgacagcgcggatgtgcaacggtgatgcggtttgtttttactttcttacaaactgcaatctcctgaccatttccggcaaggtagactgaaataacaccataaactgaataaaaacgtagggttaacacaacagtggcgccatcgaccaaaaagagcggtaaaacctattccacagttcgtttcggctggatttgcgccggcatgctggtctgtttttttctgttggcgttcagggtcggctacctgcaactgctggaacaccagcagttggccaatcaggctgaccaacgttcgatccgcacccaggtggtgccgaccaaccgcgccatgatcaccgatcgcaacgatgaggcgctggcggtcagcgtgtcgtccaaagacatcgtgctggatccgaagcatattctcgatacccagaccgataccggcaacgaacgctggcagagcatggccaacgtgctgaagatcccgctggcggacatccagcacctgatccagagcaacgcgcgcaaacgttttgtctacctcgctcgcaaggtagaggacgataacgccgcctacatcagcaaactgcatctgaccggcgtcagcaccgagcaggatttcagccgcttttatccgatgggccaggacgccgccgggctgatcggcatcgtcggccaggacaatcaggggctggagggcattgagctgggtttcaacccgctgttgcagggcaaaaacggcctgcgggtctatcagaaggacggcagcggcgcggtgatcggcgtgcttaaaagcgtggatccggtgccgccgccgaacgtgacgctcagcatcgataaatttattcagtacgtgctctatgcgcagatccgcgacggcgtggtggctaaccaggccgactccggctgtgcggtgctggtcaagatcgacaccggcgaggtcctcggcatggccagctacccgtcgttcaacccgaacaactatggcagcaccccggcgaaggatattcgcaacgtgtgcagcagcgacagcttcgaaccgggctcgacggtgaaaccggtggtggtaatggtggggctggagcataagctgatccggccggatacggtgctggacaccacgccgtatcgggtgaacggtcacctgatcaaagacgtcggccattggtcgaaactgaccatcaccggcgtgctgcaaaaatcgagcgacatcgcggtatcgcacattgcgctggcgctgccggccacggtgctgccggcggtctaccgcagctttggcctggggcgaccgaccgagctcggcatcggcaacgagagcagcggctacttgccgcagcatcgcgaacgctgggccgatatcgaacgcgctaccttctccttcggctatgggctgcgcgtgacgccgctgcagatggcgcgcgagtatgccgcgatcggttccttcggcatttatcggccgctgtcgatcaccaaggtgacgccgccggtgatggggcaacgtattctgccggcggatacggttcgggccgtggtgcatatgatggagagcgacgccttgccgggcggcagcggggtgagcgccgcagtgccgggctaccggctggcgatcaaaaccggtaccgccgagaaaatgggcccgagcggcaaatacgacggcggctacatcaactacaccgccggcgtggcgccggccagcgatccgcaggtggcgctggtggtgatggtcaacaacccgaaagccggcaagcacttcggcggttcggtggccgggccggtgttcggcaagatcatggcccaggtgctggagcacatgaatattctgccggatgcccagccgcttaacgtggtgtcgtcggtcaaggggtaagggggattagcgcgattccagcaggcgcttcagcgcctgcagatcggcgttcaccagcccgacgtcgcgggcgaacagcgcgtcgtccatgtccggctggcggaacagggtgaagatcacctcggtgccttgtcggttggcgagcgcgcgcagcggcacgtagactacgccgccgtccggcagcgtcacccaatgatccagcacgccgaaggcattgggcgcgctaaatcgaatgcggatccgcccctgcggggtctccgccatccaatcttcaccttcccgccgtaagctattggctaatcctttggcccacaacgggaagttttccgggcggctgagaaaggcgtacacctcgtcacaggggcggttgatggcgacatgcagcgtttgcgcgctcagcatcatgatttctccggttgacggcgatacttcagtgtagatcccgccgcgctcagaagtagtaaccgatgtttacgttggtgcgaaaataccatttattgctgccggaggactgggtgccggtccagccggtggcgttttccacgccgccccacggattggcgttctgcgcccaggtcagatccacccacagcatcaccggcatggcgaacacctgcaccccgagcgtattcattttggagtcggagccgccgtgcctgtccttccagagcacgctgtagtcgttgtagaagcgcagctttttcaccggtccccagggcacctcgacgtcgcgcgccaggttgatggcggcagtggtggcctgcgacgggatcagataggccggcgtcaggccgttgccgcccatcaggatcaccgaattgctggcgccggccgggcctttggcgtcgtaaccgtagcggatcacctggccggacagatgccaggcatcccgattcaccagcgtatgcaggcccgccgcccagaagctgccgttatcaccggtcgcctggttgtagagccgcgaggccgccagcgaaccgccgagctcattgtcccaaccgccctggtggaaagcccgcgtcagccgcaggtttacctgatcgcgtttttcgttgcgctgcagatgctgtgaggcaaagttggtgttcttcagatcgtcgtagctggcgacgtcgggggcgtaacgcacgccggtcggcatcatgcgcgggtagtaggcggcgtcaaaggcccaatcgccccgttggtattggtatttggcgccgagcccggtgttgacgccaaagccgaggtaaaacggaatgccgtacgaccagccgaactgcggatagggcatcaggccgaacggtttgaacggcgcgcccagctgcacggtggagcgctcagacaggtggtagccgacataggcgcggtcgatggcgtatttgcgccgatcctgaaaccagaatccgctatcgaaaaacgcgtcgtttatctggccggcggcatcgatgcgaaaggcgtcaaagcgtaaatgcggcggatgccgataattgctgctgcgccagtcttcatagcgataattggcgcgcagcgcgccgccgatatcaatattctttttattatcctcgttttgccaatgaatatgcggaaaggccgggcggttttttttaaccggcgccacggtggcagcagcgtcgctgggcaatgcgacggtagtcgcgtaactcactggtgaaacaagaaaaaaacaaagggtgatcttgcgcatgcctggcccctggtgaatgtttggtttttattaagacgagcggggtttacctgtgaataaggcactgttgctcgtttgttttatatttgagacgtttcattgtgcgtttcatatattaaattcatttccggttaatatatgaaactttgtttcttgtttaatgggaaaactataaatccggtattgaacaagtcaagaaataaaaatgagcgttgacgagaaattccgattattgggtcgccctggtttgcgggagcgacacaaagcaggctgaaatagtcgtgtcataaatgcgcgttagactcgcggcattctggcattactgactaaaaatcatgagcataaaactgacacttggccgccgggtaaaacctgcggcagcgctgccgcacgcgtttggcatcggcaagagcatgggcttattaggcggcgtaatttgcgttattgcgctattttctctgctgcaattgttttccaccgtatttatttccactattctgcacgacgccaaggttaacctggtgacgggagacgggttgcatcgccagcaggcgacgatggatcgcgccagacagtcgctgctgacggccagcgacaccctgaaccgtgcgggcatctattatctgcaggacaaagtcaccggctccgacggcagttggcatagcctgctggatgaatcgttggcggcgttggaggcttcaaagcaggcctttgcccggttcgagcgcttgagcgcggccgcgcccgaagcggcgggcgctctgaaagacagttatcgcctgttctatgacggcctgaaggaacaggcgcaagggttgcaaagcagcgccagcatcgatgcgtttttcgccgtgccgatccaggcgtttcaggcggatttcaacgaaaagtacctcgcttatcaggcgctgaacgaacagcatggcaatgacgtcaacgtgcggcaattggcggcgctggagcaggccaatacctttgcgcttggcgcattggccgcgctggcgctgatcgccgtgggggtgtggttcggcgtcgcccgctgggtgatagcgccgctgcagcgggcaattgtccacctcaacgtgctggccgccggcgatctttcgcggccgctgccgcctgagcgggcgttgaaccgcgagatgcgtcagctgcaaaccagcattggccacatgcagggcggtctgcagcgcctggtaagcgaggtgcgcgatgcggcgagcgggatcctgaacggcgtcgagcggctggcggacggcaatcgacagttgacggcacagtcggcgaagcagaacggggaactgcagttggcgaccgagcacgtgcagcagttggcggcgcgggtggaagaaaacggccaatacgcgcagcaggccagccaacgaaccgaacaggcccggcagtgcgccggcgccggtgagcagatgatgcaaaccgtcaatgtttcgatgcacgggatcgtcaaccaatcggctgagatgcgcggcattgtcgcgctgatcgacagcgtggcgtttcagacccatattctggcgttgaatgcggcgatcgaggccgcgcacgccggcgttcacggccgcggtttcgccatcgtggctaaagaagtgggcttgctggcgcaaaagagcagccattcgacgcgcgatattcagcagttgatcggtcgctcattgcagcaaatcgatcaaggttcgcaggcggtcgaacggctgacgggcaacctgcgcaaaattatcgatctggtgaacaaatgcagtgcgctgatgggggaaatctcgctggcgtcattcaatcaaggggagagcatccaggacgtgacggcgcgcatcaccgcgctgaatcaggtggcgcagcaaaccggcgccgtggtgagcgcggtgaccgaggcttcgcagctgttgcagggcgagtcggaacggttagaaaaagtgatggcgcgtttcaggctgccggcgcaataaatacttccgatgcaggttaatgaataataacgctgcgcttaatgttattcattatttccctgtgctgagggacgttatttcgataaataaaaacaggccggcgcttatggattaaaaaagcgccggcctgcagagattattttaacgggaggattaacggctggtctggtggccgataataccgcccagcgctgcgccgccgagggtgcccagcgtgctgccgtcggtcagcactgcgccgccgaccgcgccgacgcccgcgccgatcgccgtgttgcgatcgcgattggacatatgcccacatgcggtaacggaaagcgtcgccatcaccaccaccaacacacctgcggcacgtttaatattcataatgagttcctggtaaattggctgattaatggattaaaaataatccgattaacccaccggtagaagttgggatgaatgtattcctccgaaagaaaatcgaacaggtaaaaattcttaattttgcggcggtgaaaagcgattgctcgccgaatgtgcggccaccgacaaaaccgctggtctatactgggaagacgcctcgcgggggcggggcacacactctggaggccgccatgtccgatctcgtttccgcgtccggcaaaccggtgaaaatccccggcccggatcacccgatcaccttgactcgtcatccgacgcgggtcgtggtgcgtgctgccgggaaaaccctggccgacagtcgcaatgcgctcatcctgcaggaagccacctatccgccggtgttttactttccgcgtgaggacgtgaagatggcgctgttgcagaaaaacgagcacgtcagctactgcccgtataagggcgactgcagttatttcaccttcgcgatgaacggcgcacagggggccaatacggcctggagctatgaaatgccttacaacgccgtggtggcgatcaaggattatctggcattttatcccgacaaagtgacagaaatcagtactgaagcctgacctgccgccgccgccgggcgggggcaggttgacattccgcttatccctactcattatgtgtattactggaaactgatacgctttccttatgttttaatccgacataaacgaaactctgagcaggtgccaaggtgtctacctctacgcgatttgccgttgccatccatatcctgaccaacatcacgctgtgtcgtggccagacggtgcgttccgaagatatcgcgcgcagcgtcaacaccaacccgacggtggtgcggcggatcctcggcgcgctggcggaggccgggctgacctattcgcagatggggcaaggcggcggggcgctgctggcgcggccggcagaagcgatctcgctgctggacgtgtatcgcgcggtggaggatcaaccctatttcatgctgcaccgcgcccggcctaacgatgcgtgttatatcggccacgcgattaccccggtgctggagcaagagtttgcgcgcgttggtcacgcgctggaggccagcctggcgcaaaccagcatcgccgaaatggccgggcaggtcgagcggcaagccggctatcctttcgtcccttgttcagcgcaatatcaagcggatacgcaataaaaacccacgccaattccgtcttcccgcagagcattttttgcattgcgttaatgtaattgtgtaagttacattagctcgcatcaagtgtgatgtggctcacgttttagactgcctccccacgataatcgatcgattggccggaaaccttttcttccggcgcagattcgctgtgcttataaaccaggagagaacgatgttagaaatgcttgaaagcttggccaccgtggtggtcctggtgccggtaatggtggccgtcttgctcggcgcgatttacggcttgggtgaagtgttcaacgtcttttccgctatcggccgcaaaaataacggctgaatttgaacgtcaggggacgcaacgccccctgacgcaggactacaataccgtcgccaggaagttgcgcgtcctctcatgtcccggcgcatccagaacctgctgcacgctgcccgtttcaaccacctttccctgatccataaagacaatctggtcggccacttcgcgggcgaagccgatttcgtgcgtgaccaccaccatggtcatgcccgaatgcgccaggtctttcatcacctgcagcacttcgccaaccaattcaggatcgagggcggaggtcggttcatcaaacagtaacacctgcgggttcatcgccagcgcgcgggcgatggcgacgcgttgttgctggccgccggacagttctcgcggccaggcgttgatgcgatgttccagcccgacgcgggccagcagctgcttcgcccgttcctgcacctcggcttttttttcctttttcacccgcagcggcgcgtcgctgacgttttgcaacacggtgcggtgcgcaaacaagttgaactgctgaaataccatgccgatgcttttacgctgttcggccacctcggcttctttcagctcgtacagatgccggcctttttgacgatagccgatcagctgttcgccaacgcgaatggtgccgccgtccagcttttccaggtggttgatgcagcgcaacagggtggatttgccggagccggaagggccgaggatcaccgtcaccgagcctgccgggatggtcaggctgatgtttttcaacacgtcggtgccggaaaaggatttccgcacccggttgatgtggatggatgcgctcattgttcacctccctgaggggctttgcggttgaggaagaaccagccgcggcgcgttgcctgcgtgccgcggccaaaatagcgctccacgtagtattggccaatcgacagaatcgaagtcatggccagataccacagggtggcgaccagcagcagcgggatgacctcgtaggtgcgttggtaaatgatctgcgccgaatacagcacgtcctgcagggcaatcaccgacaccaccgcggtggttttcaactgcccgatcacctcattgcccgccggcggcaggatggtgcgcatcgcctgcggcaataccacgcgccacaggatttgcccacgacggtatcccagcgctttggcggcttccagctggccgctgccgacgctttggatgcctgcgcgcacgatctccgccgcataggccgactgatgcatcaccagcgcgatcaccgccgcgctgaaggtgctgataagggtattggtcggcgcgctggcgacttcgccaagaaacgggatccacaggctgatgcgcggataaagcgcggcgatgttgtaccaaaggaacagctgcaccagcatcggcaccgcacggaagaaccaggtgtagaaccagcttaccgcaaccaataccggattggccgacaggcgcatcagcgccagcagcacgccaccggcgaagccgaacaccaccgaaatcaccgtcagcttaagcgtcatgagcacgccgttgaggatggaagcctcggtgaggttttccgccaccaccgcccattcaaagcgcgggttgtgcagcatggaattgatgataacgccgacgatcaacagcacaatcagggcgctgagccaacgcccgtaatgccgatggccgacgatgctcagttccgcgtcgtcgacagggtgttgcccactcatttggcgatctcttcattgatgccggcggttttcactgcaccaaaaccgatatcccagccgtcgaggattttctggtaactgccgtcggcgatcagagaattcagcgctgcctgcaccggtttcaccagttcggagcctttcggcagggcaatggccaccgtggtgccgtcaatgttgatatcaccggccagcgtcagcggtttaacgtgggtggcctggtagcgcaacccttcatacgggccgaaaaacatcggtacgcggccgctgatcaccgcttgcaccccggccgggcggtccgggaagatcggcatggtgatggccggcttgccggcggcgacgcattgatcgctggcctgctgcaggcgggtgatctgcgaggtgcctgcgccggcgccgacggtctggccgcacagctgcgccagctcggtgtaagggcctggcgcggcgtctttgcgggcgatcaaggccagcttggaagcgtggtaatagccgacgaagtccacctgttggaagcgctttttgttggcgtcaatgttggccagcgcgacgtcataacggccggacttcaggccggggatgatgttgtcgaagccgccggtgtccttccagtggatccccacgcccaggcgatcggcaatcgcgctcatcacgtcgatttcacgcccggccagcgttttgttgtccgcctggtaaaaggtggtcggcggggtgttcgggttggtgccggcaacgatgtagccggcctttttgatcgcttcaggcaggctgtcgtgcagcgccggatcggcggcagctttcagcgccgccttgaagggaacatcgccttcagcggcatgaccggctgccaacggcgccagcgtggaggaagccaacagcagggacagtacggtgcgtttgaatgtggttttcatcatgatttccctgcggattaagccgattttacgttagcgaagttgattgccggttccggcagacccaggttttcacgcagggttgcatgctgatactcttcacggaacaggccacggcgacgcagctccgggatcacctgctcgacgaacagttccagctggttgggcaataccgccggcatgatgttgaagccgtctgcgccttgctgttccagccacagctggaagtcgtcggcgatctcttcggcggtgcctaccaccacgcggtggccgcgcgaaccggccgcgacggccgccagctcacgcagcgtcaggttttcccgcgcggccagatcggtcagcagtttcacgcggctttggccgccttcggtggcgcccacgttcggcaccgggccgtccagcggataatcgctcaaatcgaaaccaaagcgcgccgacagctgctcaatgccgttatcgatatccaccagttgattcagctgataccaggtttcctgcgcttcttctttggtacgcccgacaatcggcatcacacctggcaggatcagcaggtggtccgggttgcggccggcgtcggccacgtattttttctgactgcggtagaaagcttgtccttcttccaggctggcggcggcggtgaacaccacttcggcggtttccgccgccagctgctggccggccggggaagagccggcctcaatgatcaccggccgtccttgcggcgagcgggaaatgttcagcgggccctgcaccgagaaatgcttgcccttatggttggcggcgtggattttctcgtcgatggcgtacacgccattttgcttgtcgcgcacgatggcgtctttttcccagccgtcccacagtttgtagctggcctcgaggaattcccgcgccacttcatagcgttcggcgtgcgacggcagatcttcacggctgaagttgcgcgccgcatcgctggagaaagaggtcactacgttccaggcggcgcggccgtggctgatatggtcgatggaggccatggcgcgtgccaggtggaagggttgatcgaacgtggtggaggcggtcgccgccagcccgatatggcgggggttgaccgccagcgccgcgagcagcgtcagcggctccaggcgtgacatcgtcgagggcaggcggtgcacgctggttgccaacgcgtcgccgacgaagaacatatcgaaagtgccttcttcggctttttttgcgatccaggtgaaccagtcgatatcggtcggtgaaccgctggcgccttctgcgcgccatcccccgatgtggtgccccagagcctgaacgaacaggccgagacggagttggcgcgatggtgttgaaggtgaagtactcataattattcctgttttattattaatttaacaatgcaatcagtcgcggcagcgcgccaggggacataagcgcgcagtcgcggataacgctctcgccttcgaggcccggaagcagctgcagaatggcgcgcagcttggcgtcgaggtctgtcggccgggcggcggtttgctttcttgtgactatgtcacttattcgcctcccgtcctgcagcgtcagggtcagacgatggaagcgcatctccggatcgagcgcgtccggcggggctgcgggatcgacatggcgcacaacttttgccgccagggcggcgatagccgcatcgacaggctgttcgccgtaatgcgtcagcgggacctcgccgtggtatagcgcatcggcgatgacgtattcgaggctaaagcgcgcttccacaccggtggccggttggcgaataaagggcgcagtatctgcgccgggcggaaaactgacctcaacctgtgcgatctccgcaagggcgtcgccttgtgccagcagccgcgcgcgcagggcgagcgccgcctcggccgcgctgtgagtgccaccgcaagtcgggtaccgcttgaattccagccccggctgcaggatgcgccagggcgtgccccagccggcggtcaggcattccggtttttgccggccgccgccgtgggaagtcagcaggctgtccagcacgccctccggttggccgatgaaaccggcctgagccagcagagcggcgttgaccgcgttgcgtgccgccaacccggcatgcagcggtttggccgccgaaccgaactggctgcgcaggcccgctgcctgcgtggccgccaggcccagagcaatctgcgtttgccgctggtcaagctgcagataacgcgccacggcggcgcaggcggcgaccgcgcccagggtggcggtgctgtgaaaacccagcacgtaatgttgcgtgccagcggccaatcccagccggccagcggcctctacgccgatgacataggcggttaacagctcagtgacatcgtcactctcaccgttcagcgccagcagggctgagagcactacggtgctcggatggccacgcagcgcaggatggtaatcatcgaagtccaacgcgtggctgacatagccatagcgcagtgcgcggttctcgctgccgttcggcggaaacgtcttaccgatcgctgccagacctgcatcgctcaacgccccgcgggcaatcggcagcgcgcaggcgaagtaatctttcacgccgcggcgagcggctgacagggcgttttcatccggctggctgttcaatatcagatgggcgaattgggcggttatcggtaatgacaaggcgttaacacctgaatttatatacggttatgcacgagtgcggggtgaaaggtattgtgtggcgattttcgttgtcccgaaagaacgaacggcgcttccatatctctgaatggaatataacgacggcactgcgccgccgtcagagctgctggcaggcgcggcaggctgcgccttagctatttttgtgcaaagcaaagctgtatttgctctagcacgatagaggactcaggccgagaaaaggcgaacgctcatgatgtcgataaatgccctgagacgcggtgtaagatgtttgcttgaaggccagagaattttgagactgccactgtgtcggcagtggtcgccaagcaccggttggagtcgccgtcgctccagcgcctctcgcaccgcgaaatcgggcaagcaggcgatgcccaggccctgttccgccaggtaaatcagcgtgtcgacggtgttgcataccgtgcgcttgcccaggccttcgtcgagcagtttatctccgcccgccaccggccaggtctcgattttgccggtggtggggaatctgtataacaggcaggcgtgatcgcgcagttctgccggctggcggggtattcccgctcggcgcagatactctggcgccgccaccagctgtaggtgaaacgtgcccagttggcggctcattaagcgagagtcctcggtatcgcccacgcggatcaccgcatcgaacccttcttcgatcaccgcgactcgacggtcggaaaaatcggtttccagctcaatctccgggtaacgccggacaaattccgccagcaccggattcagcaggccgcccaccagcggcaaactgacacgcagcttgccgcgcggcgcgctgtgcgtatcgctgatttcccgttccgccgccgccaattccccgagaatacgctggcagcggtgcagaaacagccggccttctgcggtcagcgtcatgctgcgcgtgctgcggtggaacagacgcgcgcccagccgattttccaggcgggcgatgcttttccccaccgcggaagcggaaatgccgagcacgcgcccggcctctacgaaactcagcgtctctgcggcctgcacaaagacgttcaccccagacagattatccattgcttgccccattgcggacttgagtgtccgctatgaaaggaaatctagcctgttttttcgttaatcaccacgctctatgctcggtggcgacagcatgggctgactacctggagtaataaagatgaatgaatacggatcctctgccaacgcgattgacggcgcgatagagcaagccttgcgtgaaaaacgattggttggcgcggtcgttttggtggcgcagggcggtgagatcgtttatcaccgcgcggcgggcatggcagatcgcgaagcgggcaagccgatggcgctcaatacgctgtttcgtctggcctcggtatccaaaccgatcgtgtccacggcggcgctggcattgatggcgcaaggcgccatgcggttagacgatccgatcacccgttggctgccgaattttcgcccgcggctggcggacggcaccactccgttgatgacgctacggcatctcatgacccacaccgccggactaagctaccgctttttccagccggaagggggattctatgcccagctgggcgtctccgacggcatggatgaagcgtctgtcagcctgcaggagaacgtgcggcgtattgcctgcgcccctttgctggctccgcccggcgcggcgtggcgctattccatcgccaccgatgtcctgggcgcggcgatcgaacaggcgagcggcctgccgctgacgcaggcagtaaaaaaatgggtgaccgggccgctggcgatgacggataccgatttcctggcggtggatcccgcacgtttggcggccgcttacgccgatcatcccggcgagccgcgccgtttgcgccaaccggatcgtttaccgttcatcgatggctgcgccggttttcatctgtcgccggcgcgtgcgctggatccgcaggcgtacgcctccggcggcgccggcatggtcggctcggcggaggatttcctgcgcctgctggaaacgttgcgccaggggggcgggcaggtgctgccggccgaatgggtgacggcgctgaccaccaaccaaatcggcgatttgccgatgccgttttggccggggcgcggtttcggcctcggcattaccgtactgaaagatcccgtcgccgcgcaaacgccggagtccgttggcagctggcgaatgggcggcacctttggccattcctggttcgtcgatcctgtccggtagctcagcgtcgtcgcgtttaccaacacggcgctggagggcatgtccggcgcttttgtcggcgagatttgtcaggcggtctatgccgcgacgggagcgatacaatgcgcctgatgccaccgattttctttatcgcgctggggttgttcggcgtttactgcatcgagtttggcgtggtgggtattttgccgcagatcatcgcgcggtatggcatctccacggcgcaggccggctggctggtcgggatcttcgccctgaccatcgcgctgctcgggccgctgttggtgctgctggcgtcgcgattcaatcgcaaacgcatgttgttgatcgcgttgaccgtgttcgcggcggccagcgcgctgtccgctcagacggacagtttcgccatgctcatgttgctgcgcattgtgccggcgttgtttcatccgatctatttttcgctggccatggtggcggccgcggcgctttatccgccgcatcaggccaccaaagcaaccgcctatgcgttcatcggcaccagcatgggcatggtgttggggataccgttgacgcaatggatcgccgggcagttcagctatgaagcctcgttccggttctgtgcctgggtcaatctcctggcagcggcgggattgctgatgcggttgcccgacgtcgccgttcagcgcctcagctatggcaaacagctgacgatcctgcgcagcgggacgctgtggctgaatatcatcacctgcgtgctgatctttgccgccatgttcgccgtctacgcttatgcggccgagtacctcagcagtgaagccggcattggcgccgccgccatcggctttcttctggtggcgttcggcgtgggcggtgtcgcgggcaacctgttggccggcaaggggttgagccgccatcgagcgctgacggtgctgctgcacccgctagccttgattgcggcttatgcgctgctgtatcactacggcagctcgaatatcggttcgatgacggcgctttgtctgtattggggagcggcgcacaccagcggtttgatcgtgacgcagatctggctgacatccgaagcccccgaggcgccggcgttcgccaccgggctgtatatcgcctttatcaatttgggcgtggcgctgggctcactggcgggcggctggttcatcgccgcgtgggggctacagggcagcctgctgtgcggagccttgttcgccgcgctggcggtgattacgatcgccgccaggctgcggttgcagcggcagactaccgctgcgttgcgtcgatcatcgccatcacctgccggaacatcgcgctttccgcatcggccagctcgttgaccagcgtaaagtgattgcagtggcggtcggccagcaactgaacgtcgaggccgcgcgccagacaggcgtcataataggcctgcgtctggtttttgaagccttgcgtttcccgctggccgacgtcgagcaggatctgcggcgcatgctctttcgctggcagcaaaaacagcgggctgagcgtttgcgcctgttcgggcgtcaggtgcagccagtcgttgatgtagatatcgcacagcgggcgcagatcgtagaggccactcagcgccagcgcgcctttgatcgcgtcgggcggcaggcgatagcgttgctgccagccgtcggcgatcagcatgccgcacaggtggccgccggccgaactgccgctgacgaaaatgcgcgccggatcgatgccgaacggcgccccgtgatgataaagccaggcgacggcgctgcgcacctcgtgcacgatctccgccagcgtcgcttctggcgccagtgtgtattccagcgtggcgacggccacgccgcgctgggcaaacgcggcggccatcgaacaggcttcctctttgcgctgcgaatgccagtagccgccatgaataaagatcagcagcggggcgggctgcgtgcaagccgggaacagatcgaggcgctcggcggcgctcatgccgtaacgcagatcgtaaatgccgggcgtctgtgccttggcgcgctgggccagcgcggcgtattccgccatgcaggcgtcaaaatcttccaccgaagcgcgggcgttgtattgcaccgctctggcggcggtatcgtcgaacatcaggtcgattttcataacttctccttgttggtgacgctcgattatccacctaatgcttttttaatgtttgatgcggaatgcgtcgccgacgggcgttcttttttgcttctttttgcggtatattgctgttttatgcgttctactgcggaataaactcatgcacaaagcggcacgacagcgccatttactggatttgctcagcgaacgcgggcaggcggcggtggcggaattggccagcgccatcggtgtttcggtcgataccgtgcgccgcgacttggccgatctcgagcggcaggggttggcgcagaaacatcacggcggggcgatagcgctcgaaccgtccggcatgccgcgccaggcgcgcgctgcgctgttgccgcaggtcaagcagcggcttggccgcgcggtggccgcgcagatcccgcccggcagcaccctgatgctggatgcgggcagtacgctgttggcggtggcgcaggcgttgcgcggcccggcgacggtgatcaccgcttcgctggatatcgcgcagtgcctgagcgacaggccggagatcaatctgatcttgctcggcggccagtgggatgcgcgccagcggctggtcgccggcagcgccacgctggcgttgctggcgcgctaccgtgcggatatcgccttgctgggcgcctgcgcggtgcatcctcagctgggactgagcgccggcgaagaggccgatgcagaggtcaaacgcgccatgctggctaacagcggcgagcgctggctggtggccgaccatatgaaactggatcgctgcgagccgcatcacgttgcggatctggcgcagatccaacgcctgtttaccgatcgcccgtgggacaacctggacgaacaatcattgattgaactttgtgtcgtcgccgacgaccgctagaggagaacactgatgaacgataccgctcgaccgttgcaggtggccatgattggctacggctttgtcggcaaggcgtttcacgcgccgctgattaacgcggtgccggggttggaactgagcgtggtggcttcgcgcgatgccgccaaggtacatgccgatctgccgcacgcgcaggtgatcgccgatccgctggaggccatccgccggccggaggtggatttggtggtgatcgcatcgccgaacgacacccatgcgccgctggcgctggccgcactggaggcgggcaagcacgtggtggtggataagccgtttacgctggatttggcgcaggcgcgcgcgctgattgccgcggcggagaagcacggccgcctgctgtcggtgttccagaaccgtcgctgggacagcgatttcctgggggtgaaacaggtgatcgagcaggggctgatcggtaaggtgacgcactttgagtcccatatcgaccgctatcgccctgaagtacgggtgcgctggcgtgaacaaaacctcccaggcagcgggctgtggttcgatctggggccgcacatggtcgatcaggcgctgcagctgttcggtttgccgcacagcgtgcaggccaacatcgccacgttgcgccccaacgcgcagattaacgactgggcccacgtggtgctgaactatccgacgcaccgcgtgatcctgcacggcagcatgctggtggcgggcggcgtctcacgctttaccgtgcacggcgagaaaggcagcgtggtcaaagcgcgcgccgacgggcaggagagccagctgctggccggcgtgacgccgggttcggcggagtggggcaaagacgacgacgcgatgagcctgtttatcggtacggagccggtgcgcacgctgccgacgccggatggcgatcagcgccagtattacttccaggtgcgcgatgcgttgcgcggcgcaggcgccaacccggttaccgcggcgcaggcgttggcggtgatggcggtgctggaagcggccaccctggcggcggaaaccggtgtgactcagacgttgccgctcaccgaggcggaaatcgccgcctggtaacggctcgcgtcagataaggcgtcaggcgcatggatacagtgcatgccatgcgtcttccgccatgctaacccctgacataggcttacccgcagtctatgtcaggagtgttcatcatgttatcccacccttcgccgcaaggcgtccgcggcatactggccgctctttctctgagcatgctgctgtcatcgcttggcatcagcattgccaacgtcgggctgccggcgctcgccactgcgttccatgcctcgttccaggcggtgcagtgggtgttgctctgctatttgctggccgtcaccacttgcattatcggcatcggccgtttgggggatagcctcaatcgtcgccgcctgctgctggcgggcattgcgctgtttaccgccgcttcgctggcttgcgcgctggctccgcaactgtggctgttgctggcggcgcgcctggcgcaggggctggggggcgcagtcatgatgtcgatcgccatggcgctggcgggcgaggttctggggaaggaaaaaatcggccgcgcgatggggctgctcggcactatgtcggcggtgggcaccgcgctggggccgtcgttgggcggcgcgctgatcgccggtttcggctggcgggcgatgttcctgatcaacctgccgctggggctgctggcgctgtggcttgcctggcgatacttgccgaatgggccgcgcgcggcaacgcgcgcggaaccgttcgatcgcgccggcacgttgctgctgggcggcgcattgctctgctattcgctggcgatgaccctcgggcgcggcgacttcggcgcgcttaacctggcgttgatgttgggggcgctgttggcgggggcactgtttatccgcgtggaacgccgcgccgcatcgccgctgcttacgccgtcgatgttccgccatccggccctgacggcggggctggcggccagtgcgctggtgatgacggtgatgaccgccacgctggtggtcgggccgttctatctgtcgcgggcgctgggcttaagcgccgcgcaggtcgggctggtgatgtcggcggggccggcgggggcgatcctgaccggcataccggccggctatctggtggatcgcttcggatcgcagcgcatcgcccagtttgggctgacggcggtggccgcaggcgcggcgttgctgtcactgtttaaccgttggggcgtgctcggctatatcgcccccatcgcgctgttgaccgccggctatgcgctgtttcaggtggccaacaacaccatgctgatgaaggatctgtttcctgaacggcgcgggctgatcgccggcatggtgaacctgtcgcgcaatctgggggcgatcaccggcgcgtcggcgatgggggcgctgttttatctggcttcgcagcaggttgcgggcactgcggccgccgcggcttacggcatgcgggtgacctacggcgtggcggcgctgttggcattggcggcgttgctcatcgccttcggcggtcgccgcctgatgctgcgttacggcgcgcgctgaaccgcgtagcgttcttgcacgaaaccgttgtccgatgaagtgacggcaagcaggcgcaggcgctgctcctggccatcggcgccgaataaggggataccgccgcccaacagcagcggcacgcgcgtaatcgtcagttcgtcgatcaagccggcctgcaggaagcgctgcacggtctggccgccgtcgatatacaggtgacggcagccttgctcggccaactgcgccacgatggccgccggttcgccattcatccagcgaacgtggcccgttgcgtgcggcgcgggcggctgcgtcgacagcaccaccaccggcagtgcgccatagggccactcgggaaaggcgcggactttatcataggtatggcggcccatcaccagcgcgtcgatgtcggcgacaaacgcttcaaaactcaacccattgagcagcgaaaccgcatattcgggccgcagcagccagttgatgtcgccatccggtccggcaatgaatccgtctacgctggtggcgatgtaaaccgagcatttcatcaggcgagatctccccgataaaccacatgcaccttgttgccgtcgggatcgcgcaggtaagcgccgaaatagcctttgccgtagtgcgcgcgctcgccgggctcgccttcactgctgccgcccgccagcagaccggcggcgtaggcgcgtttaaccgccagctcgtcggcggcgaggaaggccagcatgctgccgttgccggcgctggcgggctgtctgtcgaagggttggtaggcgtaaaaacgcggcagcgtttggcctggcatcacccagcagcgggcggcggggccgccgtccggcgtcacttcccgccgttgtaagcccaatggcaacagaatggcgtcgtagaacgcggcggcggcatccagatcgctgacgccgacggtaatatggctgaacatggcgcgtttccttccccaagagagaataatgaacgcctaaaacagtagcagcgatagcgcaggatggacagaccgccgtggaggattcggattagggacgcgcgcaggtgtagcgcgcttcacggttcgcggggcaggccgccgttcaattgctctcgacgcgcggattggcgtgggtcggctggctgggataatccacctgatgcttgtgcagataatcgcggatcagctgacgcaccacctgagaaggggtgacgtcctgctgcaggcacagctcttccagggctttcttcttgtccgggtcaatcagcaccgttagccgcgccgttttcttttccatcaggatcctccagagaatgatgactgaatgataataccatgtggacgaagcggccagccagaccgcgtcgccgctcgttcttagcggaaatgcagccgttctattttgcgtgacaggtagccgagttcgcagttgaacagctcgccgctgccggcggccagcgtgcgcagcgtgctgagcggcaacgtcacctgcgccggcgtggcgtaaatgatcacgttgccgctgggggcgacgcaaaataatacggtgccgaatatccggtgcaggctgtggtacagcaggctgttttcatcgggcagatcgtggtaattgagcaccagccagcccccgtcgttcagccgcgcggcgcagttttccaggaatgtctgggtgccttgctgcggatccatggcgaacgccgaatagagatcggagaaaatcaggtcgtaacgcgtctcggcgggcgggcgcacaaagtccatggcgtcggcggtacgcaggctgatggtgtcggtggccggcagcgtaaaatagcggcgcgcgacggcgatcaccgcggcgcgcagttcaaccacgtccagacgcatggccggatcgagcgcgtgcagcgcacgcagcaagctgccgccgcctaaccccaagatcagcgccgaggtcggcggctgccaggccaccgccatcagcatcgctttgatgtagttgtggatcggctgcgcggggttgctgaggctcatcttgctttgctcgcagatgccgtcaaaccgcagcgtgcggtagtccttgtgatcggaaacgatgatttcgccccaggcgtcggtttcgcgagcgatcacctggccgcgcggggagaaatcgagggttctgagtaagctgtcaaccagagacatggtattcgcaggtttcctttggcaagcggcctatttacgggcgcacatgaaatcggcggtgcaaatgcgccggccatcgatgctggcgcggccggtgaagcgggcgatcgcgcctcgccggcgtacaaaggcgacctccatcaacacctggtcgccgggacgggcggcgcgataaaaccgcgcccgctgaatggaagcgaagtagtaatgttctccttcattcaacgccccgagataataatgcgccagcagcccggtgctttgcgccagcgcttccaccaacagcacgccgggaaaaccggcgaagtgcgcatggccgctccagaacgtcggctcattggcggtgatgttcttgatggcgctcagccggccttcggcaatgcaggtgccggcgggcagcacgcgatcgaccaacaggcagggataacgatgaggcagaatcgcctgaatatcgttgaattgcagggggtgaccgtttaatggcatggaagtgcgtgatcctgtctgcggcgaatccggtgcggtggccggcgttcggtccataatgagtgtaatgacattataataaaattatcatcagatgtgccagatgaaagacatgacggcggtgacggttggggaacagcgaaggaggggaagacacccgatcctggcgatcgggcgtggtggcgcgtttagtgcttggagcgggtcaccttgtccaaataacccatcacgaaggcggagagcacgaaggtgaggtggatgatcacataccacatcagcttgttgtcgggcacgttcttggcgtccataaacacccgcagcaggtgaatggaggagatggcgacgatagatgcggcgaccttgtttttcagcgaggtggcgtccattttgcccagccagctcagtttctctttcccttcggtgatatccaattgcgagacgaagttttcatagccggagaacatcaccatcaccaacaggccgccgaccagcgccatgtcgatcagcgacagcaaggtcaacaccagatcggcttcggtaacggcaaaaatatttggcaggacgtggagaatttcctgaaaaaacttgatcgacagggcgaccagagtgagcgaaaggccgaaataaaccggcgcgagcagccagcgggaggcgtacatcgcgttttctagcaagcgttccatcataaaattgttttaaatgcgtagcaaaaagggcgctcagtatagcgcaagaggcctgggtgaaatcaaccgcttgcgccagcagagggcgctatcaggccactacgcgcgccgtttttcgcccgctgcggatccacagcgccacggcccccgccgccgtcgccagcgccacgacgcccggccagcccgcgcttgccagaatgcggctgccgagggcggcgccggtcgccataccgatgaacacgccggtgaacaagagggcgttcaatcggctgcgggctgccggatcgagaccgtaaacgatggtttggtgcgcgatcagcgtagcctggatgcccaggtcgaatccgacggcgctcagcgcaatgagcgccagttgcgccgggagcggcaacagcggcagcagaaacatcaaggcgaaggaggccagaaccagtcccgcgccgatacgggtcacgacgtcagggccgtgccgatcggccagactgcccgccaacggcgccgccagcgcacccgccgcccccgccaggccaaacgcgccggcggccgcgctgccgatctggtagcgctccgccagcatcaacgccagcgttgaccagaaagcgctgaagcccaatgacagaaagccttgcgccagcgttgcgcgccgcagcgcgggatactcggtccacagatgtcccagcgagcgcagcagcgcggggtaactcagcgcgttatgagggcgaagacgcggcaacatgcgccagatcgccagcgtgatcgacaaaacgcccagcgccgcgagtgcgtagacgctgcgccagccggcgtactcggcgagtgcgccgctgaacacccgcgacagcaaaatgccggccaatagcccggtcatcactgcgccgacggttttgccgcggctggtctccggcgccagcgtggcggcggcggggataatgtcctgcgcgacggtggcggtcaggcctatcgccaggctgctgagcaacaacagcgggaacgaggcagcaaaagcgcagagtaacagcgtcagcgtcagcagcgcgccttttaccagaatgatccgccggcgatcgtaccggtcgccgagcggcgccaacagtaaaatgcccagcgcatagcctaactgggtcagcgtcggcaccatcccggcatcggcgacgccggcgtggaaatcggcgcccatcatgccaagcatgggctggctgtaatagattgacgcgacgctgaggccggcgccggcggccagcagaaatacgacgttggcggacggtgcgccgtgggtggtggcggtgctcatggcaaaaattcctgtaaggtgaatgtgcggtcatttttaccgcttgcttcatgccgctgtagccccctcgcaggtaaaactgttatacactcaacgtatgaataaaattaacttacctaacggcgaccgcataactttgctgcatacgctggtgcgcatcgtcgaaagcggcagcctgtcggcggcggcgcagcagctgggcacttcgcagccgacgatcagccggcgtctgcaggcattggaacagctgctgggcgccaaactgatccagcggaccacccacgccctcaaactgaccgacgacggcgagcgctgttaccgccaggcgcgggggctgattgaacaatggcaaagcctggaagaagggcttggcggcgcgcgcgacgaaccggtcggcgtgttgcgcgtgcgggcgccgcacgcattcggccaggatcagctgatcggtccgttgggcgagtatttgcggcgctacccgcaaacttacgttgagtggacgctgaacgatcattctccggactttattcccgagggggtggattgcgccattcacgtcggtgcggtgaccgatccgtcggtcgtggcggtgttgctggcggaggtgccgcgcagcacggtggcgtcaccggcgctgttggctgaacgaccggcgatcgtcgatctcgacgatttggcctcattgccgtggctggcggtaaacagtttttatcgtaatgaggtcgtcttgacccacgcgaccagcggtgaacagcggcgtttcgacatcgcgccgaggttgagcaccgacagcctttatgcggcgcgcaaggcagcgctggaagggctgggcgtcgcgatcgtgtcgtcttgggtggtgaaagaagaattggcgcaaggcgctctgcagacgctgttacccctgtggcgagccgagccactgcctatttacctgttgtatccctacgccagctattatcccgcgcgtttacgcaaattcatggaaatgatgaaagaaacgatgccgcgcattctcggcgcgcagccgccgacggggcgctgacggccttcagtgtctggcttttttaccgtcgctgtggccgagagaacgatcggggaagctgtgatcgcgcagccgctgctttaactgcgccgcatcggggaagccgccgtcaatcttgcgatcccaaatcatcacgccatcgacgctgatttggtagaccccgccggtgcccggcatcagggtgacggaggcgagatcgtcgccgaaggtgttcagcagctcttgcgccatccagccggcgcgcagcaaccagttgcattgtgaacagtagtgaatcgtaacggcgggtgcgtttttcatcgttgatcgaccggttagtggtgacggcttgcaatcagcctgctggctcgcaagcgatggtggctgtgtatcgccaaatagtcaagcgcctgctgcggccagagcgacaaggggagccgagtgtgcatcacggccgcttgcttccggcaaaccattcaaccccgcgcagcatgcccgcccaataaaaccggggtaaaaaccaggctttcagccaccaggccatacggctgggctgggttgcgtcgagcagtggaaacgtgggcagcaatttaccgtcatagccaaactccgccagcacaactttgcctttctcgaccgtcaatggacaggaaccataaccatcataatgggctgtgagaggcgtgccatgaatacgtgccgcgacgttttccgccaccaccaccacctgctttcgcgctgccgccagggttttggcgtttggcgttgagcaacagtcgcctaccgcaaaaatatccggccaatgcttatgttgcagcgtcaatttatccacatcgcaccagccggcgccatccgcgagtccgctttgcgaaataaacgccggggctgattgaggcggcaccacgtgaagcatatcgaagggtagggttaactcgcgtttttcctcttcatttgtctccacggcaaatatcgcttgccgattttcgccatctatacggattaaattatgattgaagttgacctgtgcacggtatttttccaaatagccgctcagcggggggacaaattgcggaatgccaaaaaccgccgtgcccgcaaggcagaaattgacgttaatattattcagaacgccttgccgccgccaatggtcgcatgaaagatataaggctttttgcggcgcgccggcgcattttatgggaagcgtgggttgggaaaatatcgccttgccgccttgcatctcccggaccagttgccaggtgtattctgcaagatcaaaacgataattagaggtgacgccgttaaatcctaacgtctcttcaaggccctctattttatcccaacgtaaaacaaggccgcaggcaacaataaggaaatcatagcttacgcgtttaccctgacgggtctcgatatatttttcattgggatcaaccctgacaacgctgtcctggagccatgagacgccagaaggaataacatcgcgcatggcgcgctgcgttttattgatatcaaagagcccgccgcccaccagggtccatgccggctggtaataatgacagtcattgggttcaacgacagttatatccgcatctttaactcgcttccttaagcttgcgatgacgccgatgccagatgaaccaccgccaataacaacaactttcttcagggtgtttattttttctggtttcatgcaggtctcctttcataagaaagtagggggttgtggctcagatttaaagataatttatagaacttatggttatattaaaaatcacatattcgatttagctatatgtaatagctaaatgtaataagttatttgacaatcaacgcaaactgatcgttaataaatgccataaatatcgaaagggaattaatgcattggattttttccattttactttttataccctgacgctgttggtgataaccgggggaatagtcggatttctcctggctctgaccgggggaggcggatccatcgtctgcgttcccttgctgctgtatatggtgaaaatcccggatacgcacttggttataggcaccagtgccatgtccgttgccattagcgcgctgatcaatctttttgttcatgccgccaaaggaaacgtccggtggcaaaccggcgttaccgtttcgctggtggcggtggtgggaacgctggcgggctctcaggtgggaaaaatgacggacgggcaccatttaaccctgcctttctctctgctgatgctggttgtcgccggattgacgctgaaaagaaatcatcgggcaggcaacggattaccgtcctcccatccgacatttcatcccgccatcgtgtggcccagcgtgctggcgctgggcgcggtggccggttttttgggcatcggcggcggatttttggtggtgccggcgctgctctggttcttccgcttttcgctggttgaagcggtggcgacctcactggtcgtggtttccgccatgggattatcgacaagcgcaagctatgccatgtccggcaaggtgtcgctggtcattacctgctggctcatcgtcggcggcgttctggggggcgtcgtgggggtggcgctcaccgagcgcctgaaaaaacgcgaggacattatccgtgtgctctatgccggcatgttgttggtgctggccctttatatgctttttaaaagcctataaaacaaaaggaaaaaatatgcacatccgtacttaccatcatcagctctccttttcgggggcgcccgcagcgaatgatttcgccatcctgcatcaacaaggctatcggtttatcgtcaacaatcggccagatgaagagccgggcgagtaccttaaccatcaacaagaaaaagcgttggctgagcaatggggaatgggctacgtctatctgccttacacattcgacacgctgacctgggagaccgtttatatcttccattacctgttgcggcggggtgagaagaccctggcgcattgcaggagcggagcgcgttctgcctgcctttccctgctgtatgcgctgcgcgaaggccagatagacgaagcgcaatttcgcagccagtgcgcagagtatggcgccgatgccgataaggcgctgggctggtatggccggcatcaggccgttcagcctcacgcgcaagtgcacgcgttttatgagccggaaagcggcagcctgcagtatgtcgtcgccgatcccgcagcgcgtcgctgcgccatcatcgacccggtgctggattttgatcgccgatcgggcacggtctcgcatcagcaggcccgcaccattttaagctttatccagcagcaaggatggggagtggcctgggtgctggatacgcacccgcatgccgaccatttttctgccgccacctggctgtcgcagaaaaccggcgccctcaccggcataggcgaaaaaattaccgccgtgcaggggctgtggcaagacatctataatttgaaagaattgcctcctgccgagaccctgtgggatgcgctgtttgcggatggggacgtcttttttatcggcaacctgcgtgctgaagtcttgctgtctcctggccacaccctggcgtccgtcacttatcacatcgccgatgcggcgtttattcacgatacgtttttcatgccggacagcggcaccgcaagggccgattttcccggcggaaatgcggaagccctgtgggattcgttgcagcggatcttgagcctgccagcggatacccgcctgtttaccggccatgattatcgcccggcggggcgtgaggcccgctgggaaagcaccgtgcgagagcagcgcgagaacaacccctgggtggccaacatggataaagcccaatttatcgcgcaaagaaagcagcgagacgccacgttgccgcatccggaattgatgctgatggcgctgcaggtcaatattcgcggcggcgttctgccagattgcgaagatgatgggcggcactacctcaaaatccctgttaatcgcttcaagggataaatcaagccatggaggcgcgatcgttcacggctgccaacctcaaggcgatcgcgccgtctgttaatggttttttatgaaataagcagactgattcatatttaattatttgtttttacacaaaacaggtggcacttgccctcaccgaatacagtcactacattaacaactgtacttcccactctgctaaggaaaacaccatgaaagctgccgtagtgacgaaaaaccataccgtagacattcaggataaagtgctgcgcccgctgaagcacggcgaagcggcgttgaaaatggagtgttgcggggtgtgccacaccgatttgcacgtgaaaaatggcgatttcggtgaggtgccgggcattacgttggggcatgagggcatcggcgtggtctccgccgtcggtgagggcgtcacctcgttaaaagtgggtgaccgcgccagcgtcgcctggttttaccaggggtgcggccattgcgaatactgcgtcagcggcaacgagaccctgtgccgctcggtgaaaaacgccggctatagcgttgacggcggcatggcggaagagtgcatcgtggtggcggactacgcggtgaaagtgccggatgggctcgattctttcgccgccagcagcatcacctgcgccggcgtcaccacctacaaggcggtgaagatttccgatatcaaaccggggcagtggatcgccatctatggcttgggcgggttgggcaacctggcgctgcagtatgccaagaacgtgtttaacgccaaagtgatcgccatcgacgtcaacgatggtcagctggagttcgccaaacagatcggcgccgatctgaccatcaactccaaaacgcaaaacgcggaggagatcattcagcagcaaaccggcggcgctcacgcggcggtggtgacggcggtggcgaaagctgccttcaactcggcggtgaatgcggtgcgcgccggcggtaaagtggtggccgtggggctgccgccggagagcatggatctgagcattccgcgcctggtgctggacggcattcaggtggtgggttcgctggtgggcacgcgcgaagatctgaaggaggcgttccagttcgccgccgaaggcaaggtgacgccgaaagtgaccaagcggccgctgggggatatcaacgccatcttcgacgagatgaaggcgggcaccattcgcggtcgcatggtgatcgatctcggcatggcgaagtaggccatgcgaaaaaagaaggccacctgcgggtggccttcttgtcattacgccggattcagaacaggcccagcggcttggcgtcgtagctgaccagcaggtttttcacctgttgatagtgcgacagcgccgccttgtgggtttcgcgtccgatgccggagttcttgtagccgccgaacgcggcgtgcgccgggtacaggtgatagcagttggtccacacgcgcccggccttgatcgcgcggcccatgcggtaagcgcggttgatgtcgcgggtccacagcccggcgcccagcccaaactcggtgtcgttggccagcgccagggcttcggcctcatccttaaaggtggtgacgccaatcaccggcccgaagatctcctcgcggaagaaacgcatgctgttgttgccggtaatcagcgtcggctgcaggtagaaaccgttttgcacttcgtcgccgcgctgggcgggctcgccgcccgcaacgattttgcctccctcgtttttagcgatctcgatataggacaggatcttgtcgtactgctgttttgacgcctgggcgccgatcatggtctcggtgtcgaagggatcgccctggcggatggtagcgatacgcgccagcactttctccataaactgcgggtagatggattcctggatcagcgcgcgtgaagggcaggtgcacacctccccctggttgaagaagcccagcaccagcccctcaaccgctttgtcgataaactccggttccgcctgcatgatgtcttcaaaataaatgttgggcgatttgccgcccagctcgacggtgctggggatgatgttctccgccgcacaggcgaggatgtggcggccgaccggcgtggagccggtgaaggcgattttttcgatgcgtttgctgcgcgccagcgcttcgccggcctcggcgccgaaaccttgtaccacgttgagcacgcccggcggcagcagatcgccgatctcttccatcagcacgctgatgccgagcggcgtttgttccgccggtttcagcaccacgcagttaccgcccgccagcgccggcgccagtttccaggcggccatcagcagcgggaagttccacggaatgatctggccgaccacgcccagcggttcatagatatggtaggccacggtgttctggtcgatctccgccgcggtgccttcctgcgcgcgcaggcaaccggcaaagtaacggaaatggtcgaccgccaacggcagatcggcattcagggtttcgcggatcggtttgccgttgtcccaggtttcggtcagcgccagcatctccagccgcgattcgatgcgatcggcgatcgccagcagcacgttggaacgctcctgcacgctggttttaccccaggcgtccgccgccgcatgcgccgcgtcaagcgccagctcgatgtctttggcgtcggaacgcgggaattcggcgatcggctggccggtcaccggcgaggtgttggtgaagtagttgccggataccggttcgacgaatttgccgccaatgtagttgccatagcgtttgcggaacgaaaccagcgagccaggcaaaccggggtggacatatttcatgttaagcacctctctgcagatgaaaagcggcgctattgggctgcgcctgtgaatgcggcatgtcgccgcagcaaagagaagcacggcgcgtgccagattagcgacagaggtagcatccgtaaaaaaaagaacgagttattaaaacattaagcattgagagggctgagaacttcgggtggcgccgccgtcgccgatgattttttgtgtcccgtgtcgcaacgcctgatacacatttatgatacacatttgcaacactcgcgaacgggggagaaacgcatgttgtctgacgaccgcttgcccgcagagggcgccagcttgctgacccagccgttggcggaatcctggcaacgcagccagggttatggcttgacgcgcaccgatcaacatttcccgtttatcaaagccggattgctcgaagagctgcgcagccgcaacgattgggtgccgcagcgggtacagccgctgatcgagcagctgggcgcgcaaattacgcgccagcccgccattgtggtgatcgccgacgccgacgggctggtgctggaaacccgcggcaataccgactttctgcataaggcgtcgcgctttgcgctggcgccgggcaaccagtggggagaagcggagcggggcaccaacgccatcggcaccgcgctggcgctgggtgcgttctgcgaagtgcgcggcgaccagcattttctcaaccaaaatgccggattgaactgcaccgccgcaccgatctatcggccggatggccgcattgccggcatactggatctctccgcacccgcgcagcgcccgtaccgcgatgcacagcgcctgatcatgcaggcggtgcggcatatcgaacaccgctgggtcagaagcgcgatcgccgaccgccactggacgctgcgtctgcacgccgatgcccgctgcctgggcagcgcgcaagagctgctgctggtgtttcacgacgaagtgctgatcgccgccaatcgactggcgatgatggagttccagctctcgtcggcctcattcggctccgttgagttcacccagctgtttcccgacctgttgcgacagccttccggggcaccgcgccagacgctggccggcaatcaacagcactattattcgttgcttgaggcgccgcagcgccgcgtcagcgctctgcgttctgcgccgccggcggaacggcacgacgagcagcatcagaaagcgctgcgcattctcaacgccggcctttcgctgtgcgtgaccggcgaaaccggctgcggtaaagagcatttcagccgccgcctgtttcaagagagccgctggcgcaacggcaacttcgtggcgatcaactgcgcggcgctgcctgagccgctgatcgaatccgaactgtttggctatgcgccgggggcgtttaccggcgccaatccgaaaggctacatcggcaagatccgcgaggcggacggcggcgtgctgtttctcgatgaaatcggcgacatgccggcgggtctgcaaacgcgcctgctgcgggtattacaggaaaaaacggtcaccccgctcggcagccgcagcgcttatccggtcgagttcgcgctggtctgcgccacgcaccacgatctgcatcggcaggtagaggcgggggcgtttcgcgaggatttgctgtaccgcatacaggaatacagcctgcgcattccgccgctcagagagcgggcgcagctggaggccttcattttgcagctgtggcgagagctgggcggcgagcggcgcgacattcgtctgttgccggaggcgctggcgatgctggcgcgctatccgtggcccggcaacgtgcggcaactgttgagtacgctcaaggtgctgctggcgctggcggacgatcatgcggtgcttaccctggacgatcttcctcagtccatcgcggtgctggcgccgcggcaagagaacgccgataccgatctgggggcgctgcaggcggcgatcgacagggcgggcggcaatctcagccgggcggcgaaggcgctcggcgtttcacgcagcacgctgtaccgcaagctggggaggcagaaaacggcggcggaataaggcggcgcgattgagcggcgataaggccccgctgcgcggggcctgttgctctctcaatcccccagccccggcgggttaatctcggaatgggcaatcttctcgtcgctctccgcccagcgatccagcacctgcagatagctgccgttggcgatggcgctgttgagcgaagcctgcaccgcgtccaccaggccgttgcctttcttcagcgtgacggcgatgttggcggtcttcggccagccgccgggcacgatgcccaccagccgggttttgccggtcagccgcgcctgataagcgccggaaacgttgggcccgaaggtggcgtcggcgcggccggactgaatagccagcgtggaggcggccttgtcggtgacatacaccggctgcagcggcgccagccccttggcgcggttctctttgtcccaggccagcagcaccgcttcctgattggtgccggagtcgacgatgatctttttaccggcgatatccggcgcggttttgatctgggtgattttactgtcggatttgacgtagaaacccagcgtatcctgccgataggtggcgaaatcgaatttggtcttgcgttcgttggtcacggtgatgttgtaaaccgcggcgtcatatttgccggaggccacccccagcggccagtcttcccacgaggtgggcaccagcttgagtttcaaccccaaaccgtcggccaccaggcgcgcaatgtccgcctcgctgccaatcaccgttttattgtcgcgagcgtacaggccgaacggcgggccgctgcccagcagagaaatggcaaccgtcagcgtgccggattccacgaaccggaagccggcggggattttggccacggcttcggcactcttcaccgtgtggatcggcgtttcgttggcgacgagatccacgcctggtgcggcagcggcggaaaaactcagcagcgccgcaatcactatcatctttttgctatatatcattatgttaattaccttcattattatgggtgtcacacggtcgttgcactatctctaaaggcggcagatctgtgaacgaacaaaatcaactaaccaatcttggaaaaatcatgaggcgcctctggcggcgctgaatcgatcgaggatgcaccatgtcgtcgcgtttcgctacgttgggccgcataccgcgcggcgtgtgggtattgggtggcgtgagcctgctgatggacgtttcctcggaaatgatccatagcctgttgccgctgtttatggcgacgacgctcggtgccagcgtgatcgtcatcgggttgatcgaagggctggcggaggcgacggcgttgatcgtcaaggtgttctccggcgtgctcagcgattacctcggcaaacgcaaagggctggcgctgctgggctacgggttgggcgccatcagcaaaccgtttttcgccatcgcgtcgtcgtccggcatggtgatgagcgcgcgcctgctggatcgcgtgggcaaaggcattcgcggtgcgccgcgcgatgccttggtggccgacgtgacgccgccggaaattcgtggcgcggctttcgggctacgccagtcgctggataccgtcggtgcctttttagggccgctgctggccgtcggcctgatgctgctgtggcacaacgattttcgcgccatcttctgggtggcggcgatcccggcggcgctggcgattgcgctgctgtttttcggcctgaaagagccggccaccgcgataatccacaagcgcaccaacccgatcacccgcgccaacctgcggctgctggggcgcagctattggtgggtggtgagcatcggcgcgatcttcacgttagcgcgcttcagtgaagcgttcctggtgttgaaggcgcagcagggcggcacgccgctggcgctgatcccgctggtgatggtcgccatgaatctggtctacgcctgttcggcctatccgttcggtaaattgtccgaccgcatgagccatgaaggattgctgaaagccgggctgctggtgctgatcgccgccgatctggtattggcgctgagcgatcattggggcggggtgctgtttggcgtggcgctgtggggcgtgcacatgggcatgacgcagggactgttggcggcgatggtggcgcacactgcgccggcgcacctgcgcggcaccgcgttcggcatgttcaatctgatcggtggcgtggcattgctgctggcgagtctcggcgccggaaccctgtgggaactgttcggttccgcctccaccttttacgccggggcgatcatctgcgtggtgacgctggtcggcatgaagctggcaccgttcggcgaacggcggccgtgaaagcggcggcgctcaacgccgccgcgcggtttacgccggatgggcgtcattctcgttgccgccaatcgccaggtaatccgtgtagatttgcggcgcgccggagaacgacgccagtgttttccactcgtcgtacatgcgttcggtgtcctgatgctcggccacgaacctgagcgcttgctcggttgaaacatcgagctccggatggaacgcgttgagcgacgccagactttcaatgatcagcatcaccgcgtattggtccagccggttaccgctctggcccttcagcaggtgaaacttccagcccgggtagtcttccacgcggtggatgttgtcggtaatgaaccgttcaaactgctcgggcgagacgcccgctttaagcgccaggttatgaatgccgatgacacgctgaatgctttccttccctggttcgctgcggtaattggggccgggcggcaatgaactgcggctattctcggccaccagacggtaacaggtgtaaagggtcggcagttcggcgaaggtcgcgaaggttttccactcctcaatcagcgcggcggcctccggacgctgccgccaaaaggcgtgcgcctcgtcggtcagctcgccgttgccgtcgatatagcgcgcgtaggtggcggcgtctttagcctgataaaccatcaggtactgattttcacgctcgccgcgcaggccgcgcagcagcgtccatcgccagccgggataggccgggatggcgacgcctttacggcgaacgaacgcttcgaaacgatccgaggcgacgccccgtttcaggttgattcccacgtagtgcagggagaaaaccggcgtggttgatgcatgcattaaacgatcctcgcaagttaagttagtgagatgtgttcgtcacggctttggcgctgatgctgaccagcaacaggcacagcagcgtgcagccgaacgccagggccaggctggtgtaattggcgataaaaccgatcagcgccgggccggttaataagccgagatagccgaccagcgtcacggccggaaacgcctggccaggcggcacctgtttttgattgccgacggcgttgaacagaatgggaacaatgttggcgatgcccaggccggcgagcatcaacccgccaaaggcggccgatgccagagggacggtgacggtcaacagcacgcctgccgcagcgcacaggctgccgagcagcagagtgcggaagcgcccgacggcgccgatcagcctgtcgccatacagccgcccgcaggccacggcgacggcgtacagcgtgaacccgatccccgcctgcgatttggccacgccgcgctcggcatgcaggaataatgccgaccagtcgagcatcgccccctcggtcaggaacacgaagaaacagagcagggcgataaacaggatcttgccgtgggccagcgcccaccgcgcgccgccccgtcgctgctcgccgatgccgccgtgcgccagtaaatcgccggcgacgatcagcagcaggatcgcgatgaggagggcgatcaggccgatggcctgggccggggcgaggcccgccagcagcaacagactgacgccgccggcgccggcaatgccgccaaggctgtagaagccatgaaaaccggacattttcgcctggccgctctcccgctcgacgattatcgcctgtgagttcatcgccacatccatgatgccgttgacggcgccaaatacccccaatgccgcccccatcaacagcggagcatcgagtaacgccaacagcggcaagtcgatgcacagcaaggcgcctgcgcccagcaacacggcacggcaccccagtttggcgatcagataaccggcgaagggcatgatcgccatggagccggcggcgaggcaaaacagcagcaaaccgagcgcgccgtcatcgatgcccaatcgcgctttcacgaaagggatcaacggcgcccaggcagccatgcccaacccggcgaggaagaagatcgctcgggtggcgatttgccggcgatgattctctgcggcctcgccggtaagccaaggcagcatcatgacgatcggctctgtgcgacggacagataatcggtataaatctgcggtgaaccggaaaatgacgccagttgcttccactcttcatacatttgcttggtgtcgcgatgcgctttggcgaaggttgccgcttcggcggtggcgatatcgggctccggatagaacacgtccagcgccgccaggctgacgatttccatcatcaccgcgtactggtcgagccgattgccgcgctctcccttcagcaagtgaaacttccagcccggataatcctcaatgcgatggtgattttcggcgataaagcgttcgaattgcgccggggtcacgccttcgcgcagcgccagattgtggatgccgataatgcgcgcctcaggcggttcgcccggccgttcccggtagcgcgggccgggcggcacgtcgctttttctgttctcagccagcaggcgataatcgctgaacagcgtcggtagcaggctgtaggtgcccagttttcgccactcggcgaggatttcctgcgcggcggcatgccgccgccagaattcgtgcgcgtgcgccgttctctgcccggtggcggtgacgtaacgatcgcgctgctcggcgctgtcaatctcgtacagcatcaggtattgcccgacgcgttcgccgcgcaggccgcgcagcaacgtccagcgccagccgggataacaggggatatgtacgccttgttcgcgcacgaaggtttcaaactgttgtggcgtgacgccggcttcggtatcgatgccgatgtaatagaagctgaataccggtttgggatcggagactgtcgtcgtcatctttcactcctgattggcgaatgcggcggaaaattgggtattgataatggcttcgaccagcgtgacgccgatgggcgtgagcgtcacgcacgggccatcgacggtgaccagcgctttatctaccaggattttcaacgtgcggcggatgaccgggttggcaaacaggctgttgccgtcaaagcgccgtttaaacacccgatcgtccaccggcagcaaggtggagagcgccattttgaaggcgttcacttcacgctggatcggggagaaaccgcggctttcctcgatgggcaggcggtcttggttgagcgcttccttgtacttcttgtaaccggtgatgttgatggcttcggatcgcgtcgatttggagctgccgcccaaaccgatcgccacttccggatactgcttgtcgagatcggtgatgagcgctttccacttttccggctgttgatcattgcggtgaaaatacatggtggggtgttcggtatagccgccattcaggtagttctcgaccagctcgcgcatttggtactgtttgcccagcccagggaagcgcaggttgttgatgctgagcagcccctttttctgccacaggctttcgcgctcgcccgagacgccggtgcgatttttaataaactcatccatgtgcagcttggtgcagacgacgtgcgacagattcagctcgagggttttttccatgtcgtatttcacgtcgtccacgctttggcccagcatgccgtaaatgagatccacgctgacccaatcaatgccgagcgcgcgcgcgtgatgaatggtctccacgcactcttcggccgagtgcatgcgcccgcaggcggtgatgatgtcgtcattgaaggattgggtgccgaaactgattttgctgaagccgagctctttcagcagcgccagataggctttgttcagggtgccgggctccccttcgaagcgcagggtggcgttggtgaagttaaagtggctgaagtagaaggccatcatgcggcgcagttccggctccggcagcaaggacggcgtgccgccaaagacgttgaattcgccgatctccacttcggccaggctgggcacgcgcgccagccacatttgcgcctccttgatgttgaaatcgaccaaatcgcgaaataccgcctgagaggcgggcgccttgggattgaggatcaccgtggggtactgacaaaaatggcagcgatagcggcaggtcgggatataggcccagaggtggattttgcccgcctggcgaatgtcggcctccatatcggcaaaaaacgcggccagcgggtagtcgacgagatcgccggggaacacgtgacagccgaacggatccttatggacgtactccagaaaggcccggttttccggttgcaccaggaacgcgttcacccgcggcgtgggatagttttcatcgatatccagcaatgagtgcaaggcttcgtcgttcatcagaatacccctccgttgccgaaatagttgtgggcttcgccggactcgcggtcttcacagaagtaataaacaaagcgggtgaaatcctcgtctttgatcgtatcgaagcaggccggcaatgcgggcgggaagccgatatcgtcaccgacggcgcgccgcatggcggcaaacagcgcatcgcgaaattcgaggtagagccgataggcgggggttttgtaggcatggatcggtttgaaatcgatgatgcgcatctcgtgtttcagctcgtgaatgcggcggtagaggctgtcggccagcgaaccggagaagaaatcgcgcacttcgctgttttccaacagcagatacggattgagcagcaccggcagtaagatattctttggcgtgtagtccttgaccgagtagtcccaggccagtttcgcctccgccggcgtggcgtccgccagcgcggttttctgccgctcaacgtccggccggacgtccttcatgataatgatgccgtccttgccgtaggcgatgccgttgatcacctcatcgagaatggtgtccacccggcggctgttgatctcaacgtaagcatggcgagcgtaaaccggcttgccgccgtaggcgatgaccttaatgccgaagtcccagtcgtcggacaggtgttcgataaagcggccatggttgagctggtagaagatttcgatgccgcctaccgcgtcatacaggctgcgctccaccccgaaccctttgccgtcggggaagccgccgaacagggagaacgaaaattcgcgcagacgcagcgttttttggatctcgcggaacaggttggggcggtgctcaaactctgcgggaggatagtaatagttgcaggtgcccaggtcgccttgttgctcgatcatggtattcaccagctcgtaaagccaaaatgcatccacggtgcaatcggcatcggcggaaacgatatagtgcttgcgtttatttcccagccggctgtcgcgggctttagaacgcagcgacgcatagtccatgccgcgttttctggccgaggagacaccctgcaccgtttcggcgataacatgaatggccatagccggatgcctttcactaaacgcgtttattttagcgacggaatcatcggtggagttgttatcaacgacaatcagttcgtaagtgtcgtgggtgattaattcattcttggtgtgctgattgaacagcgaaagtaaaaccgcctcaatacggtcgctttcattataaacgggcagtacgacagacacaaaaacagtatcacgcatagatcctccaagggctaatgaaagtccacagttagaaatggcttgtctgaaaatgaaatgtcacgttattcgatgattagctgatatttaagaactccatgacgttgttggataaaattcgcttgcccagcgcgtaattcttttccgccacgcgcttcatctgctccttgttattaatgaaccggtagacttcctggatgaattcgtcgttcggcggcccatcctgtaactcggagatcggcatgacgggcgcttcaaacccatgtcggccgtagacttcgtgataatattcgtagcgagtggtgatatagcaacggcggcaactgatcgcttcaccgataggattgccatagctatcataatcatacgaggtgagaaaagagaccaggtcgcaagagtgatagaggtcctctatgcaaaacgtgtcgttttccgagcgcatatcgacatggggaagcatgccgacgaatttgacataggggagaacattcagttcctgcgccaatttggcgagttgcagataacatgacgggttttcatattcattgccggcgatcgccaaataggcgcgtcgagtgttgtggtcgcggataaataaatcattaagccggctgatcagcataatatcgcggtccaatcttttctgagggatgatgcgggtggttctggcaatgagaagatcattatcgcgaatattcatctgctttctgacattcgttctttcgtgactgtccgagaagtcataggtatttttctttacctcgacatggacatcatgattgcaccaggcctccagcttttgcttcagatcgtgattgagcgtgacataggtaatgtattttgaagggataggtttgatggcgtgagaataaggtggcgggccgtatttgagcacctttttttcgctgttccacatcaggtcatgatcgcgccagatgacgaaacgcgtcagtcgataacgtcggccataatcttcgatcgccagatacagcgctttggtatagatgatgttttccggcagcgtgccgttttccaccaccacatggctgactgcgagcgcttcccattgggcgacgaggcgatccgccagctgccgcgccgtcaacgcgatggtatgcaacaaagcggctttttcttgctcgtcaatgggcgttttctggccgatcaacgccgcgtgtgcgtagtcgagaaaggcggggtggtaatctggaatcgacgtgatgtcgtccaggcggaccagcgtaaagacatcgcggtagatgtcatgctcatgctgatagggtttattaaagtttcccttatcaatcttgatgtcgtatcccagatcaagataagagcgaaatccacaggcttgcagtcgtttggcaatcttcattgcttccaccgtgatccccgagaccgagacggcatcgaacgaaatgaacattgcattcttctcttgcctttcgtgcatcgcagtacctcctgctattatttgtagtgcattgatttaaattaactatttcttaacaagtctccggtaacgttcccaattgagtggaaaaagaatcgttttgacgctctggaatacactcaaatctgacagaacggaagcttaaccgttcaaaaatgtaaagatacgtttatgctttgtgagggctctcacaaatattccggtgcgggaggcgtgaaacaagcagaggaaaagaggggggatcaaccccccgaatgtggggcatgcgatgccgatttaacgattcgccatgccgccttcggcaggctgaagtatcgcctgcagcaactcgggcacctgctgggactccaccgcccggctgaacagaaaaccctggccgatatggaaaccggcttcgcacagcgtttggcgctgctgctcggtttccacgccttcggcgatgatatcgatcgacagtttttgaccgagaatgccgatgctttccacgatcgccaggatcgccggttcggtgttcatgcgttgaataaagtcgcagtccagcttaatgcagtccagcgggtaatccatgatatggctgaatgaggagtggccggtgccaaagtcgtccagcgcgatgcggatacccatctctttgagcatttgcagcgcgcgcagtacgtatttcgaaccgtgcttgttgaacgcgtgttcggtcacttccagttcgatcaggtgatggggaatgtggaacttcagcagacgttgcaggaaggtttcggcgtagttgtcgcgtaaaaactcgatcggcgacacattcagcgaaataggccgtaccgccacgccggccgcgcgccagcgggcgatatcggcgaagactttcagctgcatggcttcgctgatcttggttgccaattcgtagtcgttgaacgcctcgcttaccgtcgccggcagctgtacgccgttttgcgggcagtgccagcgcagcagcgcttcaaagccgacgatgctgccgtcgatcaggcagactttcggttggtagctggggcggatgcagttgtcgcgtacgatctggcgcgcgtagttgagctggctggcgcgggcgcgcgctttgtccatcatcttgcgatcgaacatgtagacgccgccgcggccgccgtctttcagttcatacaacgcggtatcggcgcatttcatcagctccgaagcgtcgcgagcgtctttgggatagatggcgccgccgatgctcatgccgcaatgcagcgtcttgccgccgtgggtgatcggcgtctccaactgcagcagaaacttgttggcgatgcggaaaatatcctgctcgttttcgacatcgctgatcaccacggcgaactcgtcgccgccgaggcgggagacgaacgaatgcgcattcatgcaggcgctgagccttttacccaagacccgcagcagatggtcgcccgccgcgtggcccagcgtgtcgttcaccagcttgaagtggtcaagatccagcagcatcagcccaagcgactttttgccgtgcagggcgcgcttcatctcttgcttcagctttttcttgaataagcgccggttgggcaggccggtcaattcgtcatattcgctggcgagcaacagacgttgttccatcacgcgttgcgacgtcacgtcgcgcgaaacgcacaagatctcggccacggcgccgtgttcatcgctgaccggtgtgagaatgttgtcccagtgctgttttttaccctgcggcgtcacgctcaatccggtgaagcgcgcattttttccggctctgacgttgcgtagcgccttgctgccgcggcgacggatctcgggggacagcagccccagccagggcatgccaaactctttttgcgccggatcaagaccgagcgccaggctgccggagcgattcatgtggcgcagcgtgccgtcgtgattgatcactttgatgcagtcgacgctggcgtccagcatgtcttgctggatagagagcgcctgaacgttttgctggcgttgcagcatttgcggatggatgtcggtggcagtgaggtaccagctgggctcctgcgccatgccgtcctgacgggcgttaaacgccagcataaaccaccggtaggcgccgctgcgctcgcgcagacgggcttcgccggcgaacgaggagagggcaacgatcgcctggcgccattgcgcggccaggcgatcgcgatcgtcgggatgcagtgcatcgagccagtctgcggcggcgtgctcaccggcgatggcgccggtatagtcgcgccactgcttattgaagtaaccgccaaggcggttgccgaagcaaatcagacccggcaagtcgtctacgatttcgctatagagatcaatcggatttttgttattgctctgcttgggcaacagggtcatgcggtatttcctcggaaaattacccatattcttgctctatagcagagcctctttcaatatagtcattgccaatgaaaatgggaatagccagcgggcgcggctaagaaccagcctggtagcatgaaatagattacgcaagaacgcattaggaatactcctgttatttataagcccctcttatattgcatcgaaaaataagtgctccgaccacgatgttttactgtctgaaaaagtaatcaatattgatgtttcaatgtggcgaaatgtttagctgccatgctgttgttgcgctcggcattttgcttgcgctatgcaccaatactgaagaaatcctcgcttatggcggtgatgctcaccatttcatgcacgtttcaacaggcgccaaagcacggctcccgggcgatgacgagaaaagtgatgatataaatcaagaaatgttttgtttcatctgttgacactttgctgacgtgtgagatagcctcgcgaatgataatcattagcaaaactggatggtgtcgcaaatgcattcacgtaatgatccccaggtagcggttcggatgacaggcaacgttcataacacgagaccacgtctgctgtggtctctggcaacgagacaatgtatcgaacggccgctgtcatcaggcctcttgggcggcatcttcacttagcctcaaccagcagatctcagtattaagccatggccggatcaaggcggtctattatttccacgcatttttcgcggatatatcgcgatctcacggagttgcatacgttctcaatcatgggtaaggaggcttcgggcagttaaaattaaatttactctctgggtgtaaaggaattggcaaaaagaatggggcgtatcgggttaccgctattctcaggactttgattaaccccaagagacatttcggatgtcatattaatactagcttctttatggagaaagctatgggtaataccatgaatggaaacgaaacaggttgggacagtgttaacgatcttattcactaccatgagcgcgggaatggtttgacgatcaataataaaccgtcctatgacataaatgatgcggggttgcagatagcgcgcagcgataaaacctggaatggcgttcacgtcacgggcaaagatgcgacggtgacctattcattcccggattgggaatataacgaactgaacctgggccaccgctcctcagaacgcgatacggggctaagtgcgttcacgcaacatcaacaagagcaggcgaagttatctttgcaatcctgggccgatgttgccaacctaaagtttgtcgaagtggcatcggatcaaccttccaatattacttttgggaattatgagggaaaagggcaagcgtatgccttgaaaccattctcatataatggcaatgactacagaggatacaattctgatgggcaaagttggtataatattaagaaccattctgaaaacttgcatcctgagctgggtaattacggccgtttaaccattacccacgaagttggccatactctcgggttagatcatccgggaacgtataatgcggggcaaggaagcccaaattataccaaggcagtttacgccgaagatacccggcagtttagcgtaatgagttactggaatgaatccattaccgatgcggatcatggccactactatgccgctgcaccgctggttgatgatatcgcggccatccaacatctttacggtgccaacatgaccacccgaaccggcgacaccgtttacgggtttaattcaaatacagaccgagacttctatacactcaagggcagccacgacaagctggtgatgtctgtctgggatgcaggtggtaatgatacccttgatttctcggggtatagccaaaatcaacgtatcaacttgaacgaaggcgctttctccgacgtcgggggattaaaagggaatgtttccatcgctgccggtgtcaccatcgaaaacgcgatagggggctcaggtaatgacatcatcgttgggaatcacgcagacaatacgctcaaaggcggcgccggcaatgatgttatttacggcggggctggtcaggatcaattatggggaggagacggtaatgacatttttgtcttctctgatcttaatgactcgcctgttcaggcacctgatacaatttgggactttgagtcaggcaaggacaagatcgatctgtccttcttcaaccaaggcgataaaggcagtgatttcattcagttcgtcgatcatttcagcgggcaggccggtgaggcgctattgtcctatgatagccagaacaatctgagtgaactggccttcaacatccagggcggtgcaaatccagacttcctggtgcacatcgttggacaggctgacgtcgctgttgattttatcgtttaaaatggcaacggtgggcgatgatgcccaccgtttcacatgggccacctatgtataaatttattcttgtcggaataatattcttgttttcaggagtctctatggcaagcagcctggttttaccttccgccgaaacgctatccgggcagtggacggtcagtgataaatcaaaatcttgtgttgtgcagctcaacacggagagtgtggattcggctggcggctatagcctgaaattcttgtctgattgcacgcccgacgtattgccgcaagagcctgccgcatggcgtcccgcccccgatggcattgcgctgttggacaaggatgggctaaccgtacttttcttctctcaggaagacgatcattaccgtagtcaaatctgggctgagacaggaaaaatcttgaagagaaataactagccaacaacgccttcttatccctcggcctcggccggcgcttctgaacgcggtcatcaggtttcacgtcgctccgctcacgattttctgagatatcgttcccttggttattcgttgtcttgctgcgtttatattgcgtcgggtggacaccggcgcaatatcagccggcaacgaacagccgctgctgccagtgcaacagttgtgtcagcgtgattggcgcagcggcagcaatggtcgcgcgattttccaacgcaatctcccgcgcgcgttgcaacggctcggcgctgaggcgttgcaagttttgttgcagcgcctgttgcgtttgctccagctcaccaacgctaacgtgcgtcagctcatgatgcatctgctgcaagaattcgtcggttaactgccgcagctgttccgcggtgaacgtcggggattgcagcgcgaacagcaggccttcggcatgggtgcagcggtggaaggcacattgcaccacgtagcccacgttgcgttccacgcgcagccgctgaaaatagcgcggcgcgtaaagccgggccagcacgcgcagcgcccagcggccttcggcttcatcgctttgcagcgggtaaaactgcagcaaggcgtgttcggcgccgctttccgtcagcgtgacaggaggaggtaaacgcggcggcgtttgcggctcagccgttatggcgtaggggaagtcatacagcaaatgtgacagccgccgttttaactcgccatcgccgccgaccagggtggcatgccagtgtggcgccgttgccgtagagacgttcaacgccgccggcaattgggctaacaggcggcgaatggcgatatcgttttgttgttttaactgcgcgtggcgcaggtttctcgccgcctcgttgatgacggccgacgacggcgccgccagggcccggttcacgacgttcagggcgtggcagatcagcccgtgactgcccgccagctgcagcagccacacaccctggtggcgttcgacgcttaaatgtccctcccgatgcgctaactcggccgctccggggcgcaatgccgcctgcaaaccacaggcctgttcttcgctgagtgagccatgcgacgatgggcgtagcaacagcaccggctgcgcctcgccggaacgtagatgctgcagcggcgcctggccggccggcaagggcggtatcggcagcgccgccgaagcggagaaaaagcggaaaggctccgctgtaggcgtcagcgcggcgccgacgaaggggccaagggtcagcggcagcccttggatttcgcgcgtttcaccgcccccctcgggcagcacggccaggcggcggcgcggcgctgccatcagcatagcgagttgccgtgtccagtcgtcatgctgttccgtcggcggcagccccaatgccctggcccgcagctgatcgagcggcgccaaacggtgaaaatcgcggttcgccagttgcccgaaatgctcgagctggcccggtgtcagcgcgttcagggcctgcagccatgctagcaaggcgctttcgatatgggcggcctcagacgccgagccgtgattgacggtgaaaataaaactcagcagggcgctgttttcgccgcagcgggcataatccagacgaacggcgtcaccccacgcgtgcgcgcgcagccgtgccagcagcccgcctggggcatcgtccagcaataaacgctcaagccgtcgcagccagccgcgtgaacggcagtgcggcagggcaaacaccagccgcagctgcggcgcgccgggaagagacagcgtgtaatcttgtccggcggccagcggcggcaatgtctcgggcggcgtggcgctgcccgacggcaagccgccaccgtagcgctgtgccagcgcatgcagctgctcgagcgattgcgggccttgcagccacagcgtcatgttcggtgcgcggtaatagtggtggtgaaactgccgcaacgcctgctgcaatgcggaaatatcgctgccgaaagcggcgcggctgccgatatgaaagcgatgcagcgcgtcaaatccgctgaacatctgccgctgcgccgcttcgcagcgggtttcaccgtcggcgcgcagcaggcggtattcggcgtcgatgacctcgatctcctgggcgattgcctcagccgccagctgcggggcggcgagcatatcgctcagccgagccaacccctccgccagagggtcagcgcccacttcaaagaaaaacgcggtttgcgtggcctgggtggtggcgtttagccggccgccggccgcctgcgtccagcccatcagcccatcttgcgcgctgaagttcgcgctgccgcgaaacagcatatgctccagcagatgcgccaggccgggccaggcggcaggcgcctgaaagctgcccgcttcgatgcacaccagtgcggcggcgccctcagcggccggggtgcttatcgccctgacggccaaaccgttatcgagctgccacgaagcggcgagtgtcatcgtcagcccttgaagatcagtcgggagttggtctgattgcgaaagcgcagctgatcgataccgatctgcgagcgattcgccgcttcacgcgccgccagaatggtgccgtgatgcggcgatttgccgcacaccgggtcggcgttgtcggcgttgccggtcagcatgaccgcctggcggcggcagccgccgtagtcttgctctttctccgaacaggaccggcagggctccggcatccagtcatagccgcgatagcggttaaagccgaaggagtggtaccagatatgctgcagatcgtgctccagcaccgacggaaacgtaatcggtaactgacgggcgctgtggcagggtaacgccatgccttccggcgtcacgctcatgaagatggcgccccaaccgcccatgcagcctttaggccgctcctcgtagtaatccggcgtgacgaacagcaggttggccagtttgccgtcggcggccatgcgctcgcgatagcgtttcaccaccgcttctgcctcggcgatctgttcgcgggtcggcagcagcccttcgcggttcaggtgcgcccagccgtagaactggcaggtcgccagctcgacgtcgtcggcatccagctggatcgccagttcgatgatgcggtcgatctggccgatattatggcgatgcaacacgaagttgagcaccatcgggtagccgagcgccttgactgccctggccatcgccagcttctgctgaaacgccctggcggagcccgccagcgcggcgttcaacgtttcgtcgctggcctgaaaactgatctgaatatgatccagcccggcgtcggcgaaggtttgcagtttcttctcggtcaggccgatgccggaggtgatcaggttggtgtaaaacccgagatcgcgcgcggcggcgatcagctcgggcaggtctttacgcaccagcggctcgccgccggagaagccgagctgcacgctgcccatcgcccgcgcctggcgaaacacctcgatccactgcgcggtggtcagctctttttcctgcgcggcaaaatcgagcgggttggagcagtacggacactgcagcgggcagcggtaggtcagctccgccagcagccagaggggcggattcaccgccggcgcacgtggttcagtcacggaaggtcacccatttttgttcgtaggcgcgctggaaaaactccagcacgtcgtccgccaacccgtcggcgccggggaagcgggcgttcagctgcgcgatgatgccattcagcgtggtgttgccgtcgaccagctgcaagatggcggcggcgctgtcgttcagcttggccatgccttccgggtagaggatcacgtggctgttttgcaccggctcccattgcaggcggtagccacggcggaataccggggtatgttcagggttcagcgtcattacaccagcctctggttgtgccagacccgcgcggcggtcacgctgtggtaaggcgggcggttcagggtgtaggccatgctcatggcgtccagcatgctccacagaatgtccagcttgaactgcaggatttccagcatgcgctgctgtttttctacggtgtcgcaatagtccagcgccagcgccaggccgtgttccacgtcgcggttggcctggccgaggcggctgcggaaatagtcgtaaccggcggcgtcgatccacgggtagtgttgcggccagctgtcgaggcgcgactggtggatctgcggcgcgaacagttcggtcagcgagctgcaagcggcttcctgccagcaggcgcggcgcgcgaagttgacgtaggcgtccaccgcaaagcgcacgccgggcagcaccagctgttcagaaagaagggcgtcgcgctgcaggccgacggcctcgccgaggcgcagccaggcctcgatgccgccttcgctgccgccgtagccgtcgtgatccagaatgcgctgcacccatttgcggcgggtgtccggctgcgggcagttggccatgatcgccgcatccttgatcggaatgctggtctggtagtagaagcggttggccacccagccctggatctgctcacgcgtcgcttcgccgttgtgcattgcgatgtgatacgggtggtggatgtggtaataagcgcctttggcgcgcagcgccgcttcaaatgcctgcggcgtcagggggcgtggttgcgtcatggcgattccctacagttcgatgttcatgccgtcccagctcacttcgatgccggcggcggtcagactttgccgctctgccgagtcttcattgaggatcgggttggtattgttaatgtggatcaggatcttgcgtttggcgggcaaggcgctgagcagggccgccagcccgtgctcttccgccagcgccaggtgccccatgtccttgccggtgttgcgccccacgccggcgttggccagctcattgtcgcgccacagcgtgccgtcgatcagcaggcagtcggcgcggcgcagccagggcatcagcgcttcgtccggttcaccgaggcccggcgcatacagcaggccgaccccgcgcgcgatatcttcgatgaacagcgccacattgtggcccggcagcgggcgatcgcggtacggcgaatagggcggcgcgttgctgagcaatggaatggcggtaaagcgtacgttcgggcagaccgccgtgtgaaaaggttcgccgggcgttaccgggtggtgaatcaacccgccgttccagtgggagagcatgggaaacaccgggaaaccggtgctgagatcgtcatgcacttcaggggtgcaccagacgtggtgcgggcagccctcacgcagattgagcaagcccgcgctgtgatcgatctggctgtcggtcagcacgatcgcgccgatgccggtgccgcgcagcacgtcgggattgttcaattcgggcgaggccagcagctgatggcaaatatccggtgaaacgttgcacagtacccagtttttaccgtcgtcgctaacggcgatggaagactgcgtgcggcgcgtggcgctgatgctgtggctgcgaacgccccggcagttgtcgcagttgcaattccactggggaaagccgccgcccgctgccgagccgagaacttttatctgcatgtctgaaccagaaaaagagggaaagaaatgcccgcgcgaaaggcgggcagacgggcgattaacggttggaaatgtacagcgtcacttccagccccagacgcaggtcaacaaactcaggtttagtccaggtagtcatagcggtgctcctttacatgcatcgtgatagttcgagcccaatgagaaattttcgcattaggccggcccaatgttggcgaaatgtgacgaagatcgcaacctttaaagcgtaaccgggttattcaccccaggtggcggcgagcgcgttcagccagttgcgccaggtcagcttctccagcagccggttatcgaacccggcctgcgccagcgcttgcgtcaggcgcggcaggccggcggcgtcctccaacggttgcggtacgttgaccccgtcaaaatcagagccaaatcccacgcgatcttcaccaagtttagcgatcaaatactcaacgtgtttaacaatttctgttaggtcggtcgttgcactgtcacgtttaccgtcagcgcgcaggaaggcggtgccgaaattgacgccgactatcccgccgctctgggagatggcctccagctgtgcgtcggtcaggttgcgcggctgcgggcagagggcgtggacgttggagtgggtggcgaccagcggtgctcggctcagcgcggcggtttgccagaaggttttctcgttcatgtgcgagacgtcgatcatgatgcggcgctggttgcaggcgcggatcagcgcctcgccggccggcgtcaggccggggccggtatcgggggagccggggaacggcccgctgacgccggtgccgaaggcgttcggcagattccagaatggcccgatgctgcgcacgcccagccggtagaaggcctccaactgcgtcagctccgcatcgatcatgccggcgccttcgatatgcagcaccgcggccatttgccggttgaggcggcactgttctatctcggcggcggtgcggcagatgcgcagccgcccctgggaagcctgttccagctgataaaggatagcgatctgccgttcggcgatcgccagcggatcgaaggcggcctgcgcctcctccggcgtttgattacgcatctgggcgatatagctgaccgggggaataaataccgcgaacagcccgccgcagaatccgccgcgctgcatgcgggagaaatcgaggtggcccggcgtgacgcgggaataaaaggcggcgaccggatcgtcgtcatgctgtagccacaggttgagcagcagatcgttatggccgtcgaacaccggccagagagggggaagcgtcatgggcatttcactgagtcaggcatcgtgaatgctatgttctcccatcgcgcgagggggaacaaccctcaggctatgggggttttgccgtcggctggatcactcgacatcagcagggcaaaacttagtgacattgtcactattcgcaaagcggttcctgcacgcgttggcggcagacggccaacaccaactgccgcagccagcggtgatccgcctcggcgtccagacgcggatgccacatctgcgagacggtgatgggcggcgttcttaccggcagctcgaagacgcgcagcgggccatcggcaggttgagcctggaggaaagaggcgggcagcaacgccaacaggttcgaggcttgcgccaccgccagcgcggcgggaaagctcggcaccacggcggcgatatggcgtgccagccccagctccgccagcgcggcgtctaccggcccgaggatgcgcccgctgcgcgaggccaccacgtggccgcaggcggcgtagtcggcggcgccgatctcgcgctgctgcgccagcggatgtgcggttctcatcacgccgacgaagcgatcgcggaacagcgcctgcaggcgaatttccggccccatgtcacccagcacgccgatctccagatcgaccagcccttcacgcagggggcggtcgcttttctccggcttgggcgcaaagcgcaaccgcgcccgcggcgcctgttcggcagcggcggcgatcagcgccgggccgaaggcctcgacgaagccgtcgttggcgcgcagcgtgaaggtacgatccagcgcggcgggatccaatgctccctgcgccgggcgcaacacagcgcgtgcttcgaacgtcgcgtgccgcgcccgctcgcacagcgtttcggcatagggcgtcagcaccatatgacggccggcgcgcaccaacagcggatcgccggtggccgcgcgcagtcggctgagggtacggctcatcgccgaggggcttaaaccgagacggcgcgccgcgccggcaacgctgcccgccgtcagcagcgcgtcgagcgcgatcagcaggttgaaatccgggtcggtcatgcgtttatcctgtggcgctggaaatagggaaggcgtttgctgcagtatatcagcgtaagcgctgcgtctcctgcgattgatgagcaataaaaaagccgataacaaacgttatcggctttacaggcagggggacgacgttacgccggcagctgctgtgcggttttctcgaccagcgccagcaacagcttgatgtcttccagcgtcacgatcgggttcagcagcgtcatcttcaggcaggtcacgccatcgaactcggtcacgccgacgttggcgcggcccgattccagcaaggcgtcgccgatgcgctggttgaacagggcgacggccgcgtcgcctttcgccgccagctgcgccggacggtaacggaacagcacgctggccagctgcggctgcatcaccagttccagcgattcctggtcggcgatgtaacgcgccacctgttgcgccagcgtgacgccgtgatcgatgatctcggcgtattgcttctgccccagcgcttccagccccatccacagcttcaacgcatcgaagcggcgggtggtctgcagcgatttggagaccaggttcggcacgccttgcgcctcgtcgaactcggagttcaggtaggccgcctgatagcgcatcagctcgtagtggcgcgcgtctttcagcaggaaggcgccgcagctgatggtctggaagaactgcttgtggaagtccagggtgatagagtccaccaactccaggccgtccaggtagtcgcggtactgctcggagagcagcagcgcgccgccccaggccgcatccacgtgcacccaaattttctgctccgccgccagccgcgcgatatcgcgcagcgggtcgatcgcgccggcgtcggtggtgccggcggtggcgacgatcgccatcacctgctcgccgttggccttggcctgcgccagtttttccgccagatcgttcacgtccatgcgggcgaagcgatcggttttcaccagggtgacggactggtagccgaggcccatcagcgccatgttcttctgcaccgagaagtgggcgttttcagaacagaacactttcagcttgcgcagatcgcccaccagaccgtcctgctgcacggagtggccctgacgcgcgaagaacgcatcgcgcgccagcatcagccccatcaggttgctctgggtgccgccgctggtgaacaccccggcgtcgccgggctggtaaccgacctgggcgcgcagccactcgatcaatttcatttcgatcagcgtggccgacgggctctgatcccaggagtccatactttggttggtggcgttgatcagcacttcggcggcctggctaatcaccaggctcgggcagtgcaggtgcgccacgcattgcgggtggtgcaccgacaggctgtctttcaaaaagtactcgatggcgcgctcgatcgccgcctggttgcccaggccttgcggggtgaagtcgagctggatgcgctcgcgcagttcggcaacgcttttgccctgatacatctcgggctgttgcagccactgcacgacggcttcactgctctgtgcgatcgcctggcggtaagcctcggcgctgtgcgccgaggaagccagaatcgggtttaacttggacatcgcggttattcgctccactcagactggcttgacgccggcggccaacagcgcctgctcaaatttatccaggaaaatacccagctcatcgttggtgatcagcagcgaaggcagcagacgcagcacgcagccgttgcgcccaccgcgctccaggatcagaccggattcgaagcatttcttctgcagcagcgcggacagctcgccatcggccgggtagcagcccatgtgatcctgcgcttcgttcggcttgacgatctcgatgccgatcatcaggcccagaccgcggacgtgaccgatcaccggataacgtttctgcagctcggccagcttgcctttcagccactcaccctgagcggccactttgtcggcgaccttatgctctttcaggtactgcagggtggtcaggccggtggccatcgccagctggttgccgcggaaggtgccggtgtggtggcccggttcccaggcgtcgaactcttttttgatgcccagcaccgcgagcggcaagccgccgccgaccgctttcgacatcacgatgatgtccggctcgatgcccgcgtgttcgaaggcgaacagcttgcccgtacgggcgaaaccggcctgaacttcgtcgatgatcagcagaatgccgtgttcctgggtcactttgcggatgcgctgcagccactcggccggcgccgggttaaccccgccttcgccctgaacggcttccaggatcaccgcagccggtttacgcacgccgctttccacgtcgttgatcaggttgtcgaagtagtaggtcagcgccttgacgccggcttcaccgccgatgcccagcgggcagcggtattcatgcggataaggcatgaactgcacttccggcatcatgccgttgatcgccgccttcggcgacaggttgccggtgaccgacagcgcgccgtgggtcatgccgtggtagccgccggagaagctgatcacgccggaacggccggtgtgctttttcgccagcttcagcgcggcttccaccgcatcggcgccggacgggccgcagaactgcaggcaatactctttgccttcgccaggcaacagagagagcaggtaatcggagaaacgatctttcaacggggtcgtgagatcgagagtatgtaacggcaagccgctggtaatgacattttggatgctttgcaggacgtcggggtgattatgtccaagagccaacgttcccgccccggccaggcaatcaagatattgattattctcaacatcagtgatccaaacgccctgggctttcgcaattgccaacggcaatttgcgcggataactcctaacattcgactcaaattcggcttgacgcgccaaataggtttcattgtttccgtttaatgagtttgcaactaaagtatcaatacggactttatccgtcatcatatctctcctacaaccgaaggtctcaagacgcaacgattgaattaatgaattagaaaagtaactgccttgtgaaaagcgcgaccaatatatggctttttcgcctgggactcaatagccgattttgttttgaattgtttagttttttcttaggctcatcaatatgttgttgatttgttgaccgttggttttgccggcagaaaacaacatttctttaacattgcgtaaaaatccttttctgctttcctttggctgcttctttaatgcatttattattaaggtgaatttccgattaataacataaatagaaaatagcggcttattttcatctattcaccaccttaagtcctatagcggttatatacacaaaatttgtgatgaatataagcaatcgagcgttaaaagcgcagtacccagagtggtgatttcttgcagattttacgtagcgcgatcaaaacagcgggatttttgtgcggtgccggcatgtctgccggcgccgcggtcattaacgttgccgtaaccaggcatgatagcgccgcagagtgcggcgggtgcgccaccgatcgatgagcagcgaccacagcggggagtaacgcacgttgcgcgtccgattgcggctcagagcgtgcatgcggcgcttgatcagcgccatgcgggcgagcagcgtcagcgttttgtcgcgccattttaccggcgcgggcagcgcatgaggggcttcgccggtttgccaacggcgcggcagatcgggaatttccgccatggcggtggcgatgccgaccaccgcgacgccgctgttcagcacccgttgcgccaccgtcgggcgggtgatgccgccggtggtcatcaccggcatgcgggctactgcggcgagatcgcgggcaaaggtcaggaaataggcttcacgcgccagggtactgtcgtctgccgtttcgccctgcatcgccgggctttcatagctcccgcccgataactccaccagatcgaccggcagttcgttgagcatcagcaacacctgccgggcttcgtccggcgaaaagccgccgcgctgaaaatcggcggaattgagctttaccgccacgcaaaaacctggcgagacccgcttgcgcaccgcgcgcaccacctccagcagcaggcgggcgcgatttgccagttcgcccccccaacgatcgctgcgctggttggccaacggcgacaaaaactgagagatcaggtagccatgcgccgcgtggatctgcacgccggtaaacccggcccgttcggcggcgtgcgcgctggcggcaaagcgggcgatcacctcggcaatctgcgcttcgctcatggcttccggctgcgcgaacgctttactgtacttacccatggccatcggaatggcggagggcgcccaggcgttgccacccatgtcggccattacctggcggcccgggtggctgagctgcatccaaacctgcgcgccttcctggcgcgcggccttggcccaggtttcgaacgaggcgagcggcgtatcctgttccagcaccacgccgccgggtccggtcatggcgcggccgtcgatcatcacgttgccggtgatgataagaccggcgccgccgataccccagtggcgatacaagcgccatagcgcggggccgggcagttggccttcatcggccaaattttcttccaacgcggctttggccaaacggttggtcaggcggctgccgttgggcagtgtcagtggggtaaacatcgggtttgcgctcctgtcgcagggggaatggcgctatactaggtttaaagttaactttaaggtcaatagggcatgaagatcggagaattggcggaacgggccggcgtggccgcctcggcgatacgctactacgagcagcagggtctgctgcccaaagcggtgcgcggcgtcaacggttatcgggtgtatagcgaaagcgcgctggaacggctgcatctgattcaaattggccagaatctgggcttttcgctgcaggcgatccaacgcgtgctggcgctgcagggcagcgcttatgaggatgggttgatacagggcgtcgagacccgtctggcggaaatcgagcggatgttggtcacgctgaatgagcagcgagaagcattgctggcgacccgacttaccttgctggaatccggcgtggcggggttatgccaggtcaaaaatgaaaagttggccggtgcgtggccggcctgcacagattagcggcgtttaaaggcggagcgcccggcatataccgccgcggtgcccaattggtcctcaatgcgcatcagctgattgtatttttcgatgcgctcaccgcggcacggcgcgccggttttcacatggccggctcgcatcgcaaccgtcatatcggcgataaagctgtcgacggtttcgccgctgcggtgcgagataaaggcgccccagccgtttgcctggcaaagctgcacggcggcgaaggtttcgctcagcgtgccgatctggttcagcttgatcagcgcggcattagccaaccgttcatcaatcccgcgctggatgtatttcacgttggtgacgaacagatcgtcgccgaccagctccacctggtcgcccagggcgtcgctcagaatacgccagccggcccagtcgtcctcagccaagccatcttcaatcagcacaatggggaaatcctgtaccagccgctggtaataggccgtcatctgggttgcgtccaactcgaggttctcgctgcgcaggcggtatttgccgtcggcgtagaattcactcgaggccggatccatgcagatagcgatatcttctcccggtcggtagccggctttctctatcgcctgcacgatcagctccagcggctggcggtttgaggcgaccgccggcgcgaaaccgccttcgtcgccgacgccgaccgacaggccttgttccaacaggatttggcgcagcgcctgatagacttcactgccccagcgcacggcctcgcgcagcgacggcgcgcccagaggggctatcataaactcctgaaagtccgccccttgccaacgggcgtgcacgccgccgttgatgatattcatgcagggcaccggcagcaggttggcgccgatgccgcccagataacgatacagcggcaactgagacaattgcgccgcgaggcgggcggcggccagagaaacgccgagcagggcgttggcccccaatcgactcttgttctcgctgccgtccagcgcgatcagccggcggtcaatctcctgttgttggcgcacatccaccccgcgcagcgcctcattgatcgccgttttgacgctgtgcaccgcctccaatacgcctttgccgccgaaacggtgcggatcgccgtcgcggtgctccaccgcctcgcgcgacccggtgctggcgccggaggggaccgaagcccgggccacgacgcccgccgcgctcatttcgacttcgacggtcgggttgccgcgcgaatccaggatttctctggcggttacgttttcaatctcatagctcatgggtagtcacctcattctagggagttggcacatgctttatcagcacgtcgatggacaaatggttaatgaactcgaagccgaaggaggaaaagacgccgaacggacggttctgatggcctaacagcaacagatcgacgccttcgcgggcaatcagggcttcgacgtctttgaagcgatggatactgacaattgcgcgcacctccagggggattgagcagtcctccaccagacggctgagcatggccttggcggcgatcacctcgctggactggcgatctttggtcagcgaatcgctgaggtagtccagttcggcatagtcggcgctgatgtgcgccacggtaatgcgcgtattcatctgctgattgaggcgttcggcatgatgcaacagcagccggccgtcgcgttcatcctgcaccagcagtaaagcatgttggtagagcggcatgacttatctccctgcgttagcgatctggcgggttaaccacggtaaaacctcttttttccggctcgtcatgccgggcagagacacctgacgaatgtcgagcacccggttcggcgagaaatacagggtggagcgacggcaggtgatatcggtgaccaatagcgcggccatctccagcccggcttcctgcttcgcatgttcaagcgcctgttgcagtgcgggcaacagcggatcgatgtcgctcatggtccgcacttctatctgcgacagcagcagcgagacgctctggatgcggtaattcttggcgtcgcggtgcagcaactgcgcggcggattgccccgagagatcggttttggcggcgagcaggccggcggtgaaggcgtcatagtcgacatgagcaattgcgcgtaaccgttcggcggccaaccgatcctgctcggtggtggtcggggcgctcagcgcgacggtatcgctcaggatggcgcccagcagcagcgtggcctgggcggcggaaagcggcatcggcctttccgccgccaggatctgcaggatcacggtggcgcaacagccgacggcgcgaacccagacatcgggcgggttgcgggtgattaacgtgcccagccggtgatggtcgataacgccgaccacatcgctgtcgggcaatgaggccggcccttgttcgacgtcggtaaaatcgaccagccagactttacggtcacggagatcgcctttcagcagcggaggcgcttgtacgccggcggcggccagtatgtagcgggtttccggcgtcagttcgccaaggcggaaagcgacggccggtttgccgaggtgattgagccagtccgcgatcaccagcgcgctgcagatgctgtcgctgtcgggatttttatggccgaaaacgtaaagcggcatttcccgcgcgtcggcatcgggctggagtggaaaaggggtaaagcgtgagatttcattcatagcgactcctgacatacctgcctaaaaaataaagcgaagttgtatatcaggcgtcatcatccggttcgagcgaacgcggcggttgggaaaggtggaacaccatcaccttgtgaacgactgtagcgcagcgcggtgacaaacgcaacgcctggcaaagctggcgagaatgcgcaatcggattgatactgagtgagtctatgatggacaaggatatttgccgctaatcgacggaaacgctgaacggactcacgccggctatgccgggtccgtcggtgacacaatgggagacaacatgctcgaaccctgcttccccgaaaacgaagccgaacgcctgtcggtattgcattcgctgaacgtgctggattcaaactcggtggaaaaactggatcgcatcacgcggttggcggcgaaatacttcggcgtgaccatcgcgctggtgtcgctgatcgaccgggatcgccaatggtttttatcgcgttacggtctggatgcccgggaaacgccgcgcaatatctcgttttgcggccatgctatcttgcaacgcgaagcgctggtggtgcccgataccgccaaagacccgcgctttttcgataatccgctggtgattggcgggccgcggatcggtttttacgtcgggcagccactgctgtcgctcgacgggttgccgctcggtaccctgtgcattatcgacagccagccgcagccgttttccccggaacaactggctgacctgcacgatttcgctgccgtggtggaggagtatttgcagagcattgaacgccacgtctataccgaaaacctgaagtccaatctgcaacgctcggaagccctgttcgaacagaccttcgcccaggcggcggtagggatggcgctggtgtcgctgcaggggtattggctgcgggtcaatccgcgcatctgcgaaatgttgcgctattccgagcgcgagctgatggatcgcacctttcaggacattacctatccgctcgatctcaacaccgatctggaaaaactgcagcagctgctgagaaacgagatcagcacttactcgctggagaaacgttatttccgcgccgacggctcgatcatctgggtgcagctgacggtggcgttaaaccggctgcctaacggcaagccggaccatttcatctcggttatcgtcgatatcagcgagcgcaaggcggcggaggccgatctgttcgctctgcaacacgagctggaacaacgcgtcgaaatccgcacgcgagagctgaacgtggtcgtcaagaaactcaacgaagagattgaaacccgggtgctcgccgaatgtcagctcagtgcggagaaggagcgtttgcgcgccattaccgacaacatgccggccttaatcagccagatcgacggcaatgaacgctacctgttcgccaacagcgcctacaaaacctggttcgggctggaggagtccagtctcagagaaatgacggtgcgcgatttcatgggggaaagcgtttatcggatagcaaaaccgatgatcgaacgggccctcgcgggcgaaatggtgagtttcgagaatgagctccagacccagaaggggttgctgatgatccacaccacgctggtgccgtgtgaagcgcaggggttttacattctgtcgatggacattaccgagttgaagcggctgcagcagcggctggaatatgacgcaacccacgacatgctgaccggattgaccaatcgccgcgcgtttctgcgccggttgtcgggcacgctgcaggcctgttgccatcagcggcagatggcgctgttgtttatcgatctcgacgggttcaaaacccttaacgacagctatggtcatgacttcggcgacgcgatcttgaagacattcgccacattgctcagcgcctgcgccggcgagcaccacagcgtctcgcgcctggccggtgacgagttcacggtgatcctgtggccgttgacggatccgcggcgcgaagtcagcgaattttgcgaaaacgtgttggcgcaactggccaaaattacgcagatcgggccgcagaaggtacggctttccgccagcatcggcgcggccatttccccatgcggcgatgtgacggaggagatgctgctgacccgcgccgacggcgcaatgtatcaggcgaaatcggccggaaagggcacttatgccatctgcgagctgtgagcgtgcaacggtggcggtctcagggtaagctgttttttcttttcctgtgagcagaactccggatttattgcatggcgtcaaatcatcaacataccgactggcttgaactgcggcgcgatgacgaaaccggtatcgagagcgtcaacgcccactttcaggggcatgcctacgatcctcacgatcatgatgaaatgctggtgggcgtcacgcagcagggcttgcagcgtttcaattgtcaccgctcgctgcataccagccggccggggcgcgccatgctgatcgagccgggcgcggtgcacgatggccatgcgccgcaggccgaagggtttacctatgcgatgctttatctaccgcagcgctgggtctccgacgcgatgcagcgccgcggattgggggacgcctcagtgctggaaggcgctttccacagcacgttgaccgacgatccgatgctggcgaccgcgatacaacaggctttttttgcgttgcatcagagggaaggccggctggcgcgcgatcaaagcctggaccaactgctgacgcttttggcgcggcatatacgcgtcaggccaacgtcccaaagcgatgacgctttgattgagatgaatcgtttacgggactacttgcacgagcacatggcggataatcccagtctggaggaacttgcgcttcagtgcggcctggatcgtttccgtctgactcgccaattcacccgcgctttcggccagtcgccacatgcttacctgatccggctgaggctgcgtgccgcgcgactgttactggcgcagggggaagagccggcgcaggtcgccatgcaggtcggctttgccgaccagagtcatttgggccgctggttccggcgcgcctaccgtttatcgccggcggcctatcaacgccagtgcacaaacgttctataccgctgactcgctcatcgccgatgatgcgcttttaagagcacaacggagtaaagcgaaacatgtttgataccaagatggcgtttatcgtgcgtgacgatctgcaaacctggcagcggctgaacgtggtggcctttctggcgacggggatcgccgctgcggccccggagatcatcggcgaatgttacgtggatgcggaaggcagacgctacggcggcatttccaggcagccgatgctgattttcgccgcggatctgccgggcctgcaaaatgcgcatcgtaaagggctggaacgggaattgacgctgatcccctatgtgcacgccatgttctcgaccgggcacgatgaagccaaccggcaggtttttctcgctgaaaacgcggacaacctggacttggtcggcctggcgctgcgcgggccgaagaaagcggtggataaggcgataaaagggctgacgctccacgcctgagaataccgttaacgcggtgcgcttccaatacggcgcttaggcctggaacgtctgcagccaggcggcgaattttctcacgacctcatcgtcccgatcgcgcagcagcagggagtaaacgccggttcggatagtcaacgccgggaaaggcgacaccagccgaccggacgacagatgtttggcgcagaacaggtaaggtacgacggccagccccaggccgtcttcggccgcctgaatggcggcgaaggtatggtcgagcgtgagcggcggcggtgaggcgtccagcgccgtcgggtaggtattcagccagctgtgccataaatcttcccgggcgcgaatgcggatggcggtatgctcgccaagcttgtccggcgcactgaccggcatggcgcgcaaatagctctggctgcagaccagcaagctgtcttcctgcaggaaagggatcgccttcagcccggagaagtgcgcgggatcgcgccggatcgccacgtcaaacggcgtattgcgatcgacggcgccggtgctggtggtgatatcaaccgcgatccccggatgtatctcattgaatgccgccagctttggcatcagccagtgcatggtaaacgtcggcaggctgtgcactaccagccgctgccggccggcgctcgctttcagcgcgctttccgccgcaaacaattcgcttatcacccgagacgcggtgcgcgaaaaattctcaccggccggcgtcagccgcacggacttgtgtgcgcgataaaacagcgtgatccccagctgtgcttccaggctgcgaatatggcggctgaccgcgccggtggtgagaaacagctcatccgcagcggcgctgaagctgccaagacgggcggcggcttcgaaagcgggcaggtgcggcagggagtgaacttttttcataggttgagtttagctcaaccaaatgagggacgaaagatcgtttgtcagccgttgattttgctcactattatggcgcatccttcccgcgttgccgagtgcgccatgttaagtttcgtcccgtcagttatccgtgttagtcgagtcatcctcatccatcgatggacagggaggcggcgctgagatgcgagctttctttctgctttgcgtaagccgggcaggcctctgcctgggcaccatgatgttcgctggcgcgctgccgaccatcaggagcgagtggcagctcgacgccgcttcggccggcacggtgcagacggtgttcagcctgaccaacgccctggcgctgctggtggcctcctggtggtgtgattcgttgggcgcccgccgggtttatctgctgttctcctggctgggcgccgctgcgttgatgctgttcgccgtatttgcccattcttatctcggcgcgttggtgttgatggccttcgtcggtttgacgcagggcggggcttatacgccggcgctgctgttggcgatggggatgaacggtccggcgcggcgcggttatgccatcggcatggtgctggcggccagttcgctggggtattttctgtcggttttcatcgccggttggagcgccacgcgctggggcgccggcgtggcgttttcgctgtgtgccgccggtgcgttactgggagcgctggcgggatcgttggccctggtcggttatcgggaaccgcaaccgcgcacgctggggaggaagacgaaacgtgaaagctatgctatcacctacgcgaccctgctgttgctgatcgggtatatcgcccacagctgggagctgctcggcaactgggcctgggcgcccagcctggtcagcgaggcgttgagcggcttctctctggatccgctcagcgccggattgatcgtcgcggcggtgatccacctggccggcatggtggctacattgattgtcggcaccgtttcggactatttcaatcgcgcgtcggtgctgatgtttatgggcgccgccggcgcattgggttcgctgttgatggggtggtcggcggactgggggccgggctggacgctgctgctcgtcagcatcggcagtttcttcatcctcggcgactccggcgtgctgtcggctgcgatggcggacaacgtgccgccgcaacagcttggcagtgtgatgggctggcgatcgttgctggggttcggcatcggttcgttcgccccgttatcctttggcgtggtgatggataccacccacagttggggcgcgtcttacgccgtgctggcctgcggcggcggggtagcctgtttggcggcatggctgctttggcgacaacatttgaaatgaggtacgggcatcattaatgaatggaacatcatcacgcattattatcgtgggcgccgggattgtcggggcatcgatcgcctatcatcttgcgcgtcaggggcagcgcgttatcgtcgttgagcaggcgtatcctgcggcgggggccacaggcagctcgttcggctggatcagcgaaggcgtacctgacggcgctcccgacgcgtttctgcggcgcgagatcgtggctgactggatgcgcctgacgcaggagatcccggaattgtgggtgaattggtccggcgcgctcagctatggtcaggcaccggctacgcaaaaccccgacaatcggcgtctgtccttagccgaggtgatggcgctggagccggcgctctggcggcccgatagccaggcctattttgcagcgcgcgatggcgcggtcgatccgcaagaggtgacacagcggctgctcgaacgagtaggcgcgttgggcggcgagttgcttctgggacgtgcggtcagcggatttctgcgcgacgccggtgggcagataaccggcatcgttaccgatgagggcgcgatagccgccgaacgggtcgtgctcgcctgcggcacggggatctcggcgctgctggacggcagcgaattctcgttgccgatcgaggcgtcgccggcaattttgttgcgctatcacgcggcggcgcaggcggtgaacacgctgattgcgggcgacgacattgaagtgcgtcatgcgcaaaatggcgatctgctcgcggcggaggattatcccgctggcggcaatgtcaaacacgtggaagaggacgcgcaatcggcgattcaaagccgcctgcacggctcggcgccattgcagctgcagacgtgttcggtggggctgcgccccaggccgcgcgacggttatcccatcctcgggccgctgggcgccacctgtctctatgtggcggtgatgcatccggccgtgatgtgcgctccgacgctgggtcggctggtcagcgacgagctgctgcacggcgttaatcccgccattcctcgcggctaccgcccggcgcgattcactgatcgggctgctggataatttttccggctacggattaacaccgtaatgcgctcaacgttgcagcggttttttgcgccgtcggcgaggctcttatatatttattagcatgcctgaggcaggttaggcatgaaacggcggtcgatcgggccgctgcaagtacgacagttaatccgttcgccaagaggctgcgagcctgtgctttcggtagggacagccgccaatcgtttctacggcgaccgaaggcggagcagctactcaccggtcacgaggacacttaccatgcataagagaacactggcgtcactgcattacgaaaacatgccttacgatggggtacactttcacattttgaaacgggagacgcctggccatacggcgttgctgaagctggatgcgggcagccggcaaccggcgcgttttcatccgggctgggtgaaactgatggtgctgagcggtgaactgaaggttgacgatcagacgttgcaaccccatgagatgttgatcattcctgccaataccgcttatacggtacaggccatcacggaagtgatttgtctggcgatttccgagctggacggcgccgagttggcccgttgatgagataacaacgttggatggaggagagcctaggcgctctccctatcccttcagcagtaagccgtcccccaggccgagctacctgctgattgatgcgtacacctcctgattatgccaccgcgctttccctctccatcactttcggccgcgtcgcccccgcaacgagccgccatcgcgcagcgcatgcgcaacgtcatcgcctccgttttacgcagaacgatgaaattttggtgtaaatagtgagtttcttcgcataaggcccctggtgtggcttgcgagaacgtcactatatggaggatcatgcgctccctctatcaaataaaagacattcgcgttatcaaaagggacaaacgatcatgggattcgaagtcgacaacgccgaaacgaaacgcattgacctcagcagccacgaaaattcctcgttcgaggtgacggggctggtgaaacactatccggcgggcttcgtcattccttaccactcgcataaacgctgtcatttgctctattcgcaacagggcgttatggcggtcgaggcgagcagcggtcgctggatcgtgccgcccaccaccgcggtttggttgcggccgggggtagaacatcagatcgtcatgcagagcaacatctgcgtttacgggattttggtcgatgaaatcaccgccgcgcgtttgccgctgcgcgacggcgtattacaggtttcaccgctgttgcgagaactgatcgcccagttggcgacgctggcgcctgaagggggggagaccaaacgcaatgcgctgctcagagcgttgttcctggaggagctgagcctgcagccgcagctggcgctgcatctgccttggccggtagaggcgagaatggccgaaatttgccggcagttggtcatcacgccggccgacgaacgcggtattgaggcctgggccgattcactgtcgatcagcgtaaagacctttcaacgccatttcagccaacaaaccggcatcaccttcggccagtggaaacaacgcctgcggctgctgtcgtccattccgctgctgctggccggcaactcgatcatccacgccgccttcgaaagcggttacgagagtcacagcgcctattcggtggcgttcaaaaaactgtttggcgtttcgccttcgcgctttacgctatagccttatggcatagcgcgcttctcctatagattgaagcaacctaatgacgtataaagcaaagcagtcaacttccgaggccgcgtcccgtgataaaaattgtcgtgtatctgattctcgccgtgacgatcgccattattgcggcaagagtcctctttcgtttgccggatatttcgcagcgtctgccgcaggcggcgttgccggcggatcctgccgcgctattgccggcgcgagccgccgaactgatggcggcgcatcccggcctgagcggcgtggtgccgctggtcagcggccacgatgcattcgccagccgcctggcgctggcgcgaatggcggaaaggtcgatcgacgtccagtattacatctggcataacgatacctccgggcagatcctgctgaaaaccctgtatgacgccgcccagcgcggcgtgcgcgtgcggctgctcttggacgataacggcgtcgccatggacgagaccctggcggcgctgaacgcccaggaaaacgtcgagatccgtctgttcaacccatcaaccgtgcgcacgccgaagttggccggctacgcctttgactttatgcgcatgaaccggcgcatgcataacaagtcttatatcgtcgatggcgctgtggcgatcatcggtggccgcaacatcggcgacgagtatttccaggtcggcgacgaaaactatttcctcgatctcgacgtgttgagcgtcggtaacgtggtggcggaaaccgccgaggtcttcgatcgctactggaacagcgcttcggtgtttggcgttgagcaaattatccgaggcaaaggcaatctttctgctttcctgacgcaggccaccgcgactgaaagcagtgaccgggcccgcaaactggcggtgcagctggaaaccagtgcggtgcgctttcgcgatggcgccgtgcagccggaattcacccaggtcgagctggtggccgacgatccggcgaaagggttgggtaaggcttcgcgcgatcgtttgatggtgacgcagctcagcaagatcatcggcggcgtcaaccagcagttggagctggtttccgcctatttcgtgccgggccgggaaggggcgagcttttttgaatcgcttgccaaacaggggaaatccatccgtgtgctgaccaacgcgatgaacaccaccgacgtgctggtggtccatgccggctacgccaaataccgacgtgagctgctgcaggcgggggtggagctgttcgagctgaaattgcgcgccggccaaccgacggggcgcaaggaactcaaaccgctggggctgtccggcgcagcgctgcacgcgaaaaccttcgccatcgacgataagcgggtgtttattggttcgttcaatttcgatccacgctcggcgcacctgaactgcgaaatgggctttttgatcgacagcccgacgctggcggccgacacccgccaactgtttgatggcccgctcgagtacgccgcctatcggccgacattgacgcccaagggcaaaatggtgtggaacgaagccttcgaagacggccacaccgaggtgcaccagcaagaacccggcgccggctgggtaaaacgcatcgttctcaccgtggccggctggctgccgatcgagtggatgttgtaatggcggcgaatgccgccgacacccgttaagtcaaccgttgcaagggaaccaatcctgcgcttatcggttggcttcagcatcaccagagagtttaaaagtaaacaacgctgtttcattaacgctgcctggtatccagcagctgcgtgcgatagcgcttttggtgtcgcgatagaactccggggtgcccgttagtacgatatttctggctttacccttatcatcaacatcaaacgttgcgctcacttcgccttcacgtttttcagccttcgcagaggcggaatagtatggccgctcataaaagacttggccgtcgcatcccagattaggtggttgctttgccgctggaacattgctgcctgcacgccaggcatagacacaatcgttcaccgcaccggctttttcacagccatcaggttgcaatggcgcgcagccggcaagtgccaggctcagcgggatgaggatgaatcgtgacatggcgtttcctgcatgttctatcaatcagataacgcatattttcgcttagcgcagggtatttagaaagagaaattatgcggctttcgctagggtgttaaccattcttttcttaagcgatgctctactcgaaaatatgaaggtaaatagtttgtcggggtggggttaattcttcggttaattatatttattattttacttcgctattggaactattgatgaaagtgattacttcacaagaaattaaaatagaaaaaataaccgttttgattattctttcttgtaattacctcgacagaaaccaaaggatcttccaccatgcgcatgatgaaagccgccgcctttatcgacagggggagaatagaactcattgaaaagccgattccttctcctggccccaacgatgctttgctcaaaataaccacgacgacaatctgcggtaccgatattcatattcttaagggcgaatatgccgtgcctcacggattgaccgtgggtcatgagccggttgggattatagaaaagctcgggagcaatgttaaaggctttaatgaagggcagcgggcgttggccggcgccatttgcccctcttttacatcctatgcctgccaggatggatttcctgcccaggacggagcctatttgccggaatgccgttgccacggatataaagccacggcgggttggcgcttcggcaatgttatcgatggtacccaggctgaatatgtactggtgcctgatgctgaagccaatctggcgctcataccggacggtctgacggatgaacaggtgctgatgtgcccggatgtgatgtctaccggttttaaaggcgcggaaaatgccaacattaaaattggtgacacggtggccatcttcgcccaggggccgattggtttatgcgccactgcgggcgctcgtctgcagggcgccagcctgattattgccatcagcagctctcccgaaaagctgatgatggcgggaaagatgggggcaaacgtcttgctgaattacaaggaaaccgatgtgattgatgaaatattcaagattacggcggggcgtggtgtggacgccagcatcgagtgtttggggacgcaagccaccttcaatcaagcgctgcgggtgttaaaacccggcggcaccttatccagccttggcgtttatagcgaagacctccatctgccggtgagtgcacttgcctatgggttgggcgatcatactattcgcacggcattgtgcccgggcggcaaggagcggatgcgcagaatgatgaacgtcatccagcatggcggtttggatctcagaccgttcgtgacgcatcgctttcggctggagaatatcgcagaggcctacgcgttgttcgcggagaaacgcgatggcgtgattaagttggccatcacgccataaagcccagcgatacggttagcggcggattattccccgttatccttgagactgaccgtcgccgtgcggccggcgatcagctggacgccgtggggaatggtgtcgatcgcgatgcgcaccgggatgcgctgcgccagacggatccagctgaatgtcgggttgacgttggcgagcagagtgccggcggcggtggtgcgctcgctgtcgttgatgccggcggaaagcccgtcgacgtggccgtacagcggctgccgttcccccatgatgcggatcaccaccttgtcaccgttctggatgcggcccagcttggtctcttcgaagtatccggcgatgtagaaactgttggaatccaccaacgccatgatcggctgaccggcggtcgcgtaagcgccggggcgcagggagaagttggtgatcacgccatccaccggcgcatagagatcggcgcgctgcaggttgatgcgcgccagcgcccgatccgccagggcctgatccagattggccttcgccagcgattgggcatcgcggcgattgtcgcgttcctgttgtgaaatagccgactgcaacgcctgataacgccggttttcgcgctgggatgacgccaactggacgttggcgcgctccacggcggcctcggcctgatccagcgcgttgcgcagccgtactttgtccaggctgagcagcagctgccctttatgcaccatctggttgtcgtgaatgtgcacggcctccaccttgcctgaaacgtccgtggccagcggcaccacgtcggcgcggatcttgccgtcgcgcgtttgcggggcgtaggtgtaataaagataaagctgccacagcacacctgccgcgatcaaaacggcaatcagggtcagcgcggggcgtagcagagcaagggtacgttcacgaaacatgggggcctcagggggtggtaagccatttcaggccgtggaaaaacagcccggccagaataagaaacagggcggtgtcgaacagcgggcgctgcgcgacccagcgatagatgcccaccgcgttgagcgtccaggaaagcgccatgcgcgagaagaacgcgcacaccaggcacagcagcaagggcgagatgaatacgccgtcaatgttgatttcaccgatcatgtcagggattccagtgcaaagccgtggggaagtgcagcagccgtagccgggtaagtggccgcagcgcgcgccgatcgttctgccgccaggcctgttgcagaccggcgtcgatctggcccagcagctcggagggtgcctcggcgtgcagagaaagttggcggaacgccgccggcagaccggcgttcggcgaagcgccaggagtgagcccgccggcctgctgcagacgaatcaggtcgataccggtttttaagcgcatcaacagctgtgggctgcgatcggcttgcccaacgacggccaggcggctacccagcgcggtgatgcgatccaacgcgcgggcctgatagcgctgtaagtcgcgctccgtgatgtggcgattgaggcgcagcatctcttgcgcatcctgccgcatcagccgcgctactacttgatcagtgccccagcgccggaacagcgcggcgcacaggaatgcgaaatagacgccgatcagcgtgccggtggtgctttccagatacaaccccatattgttcggcgcatagtgcccctgaaagttgacgttgctgagcgacagggcgatcgccaacgtcgccaacgggttgctcgccgcccacacgccgagcggcagcaaaaacagccccatcacgatcaggaaactgccgtaatccccggccagcggcagcagcacatagctgagcagggcgccgaggaccatagcgatagtggcgaagcggccaaaagtggcgatggtggcgccgggattgtcgccggcgccgaagaaggcgatagccacgatccccatcagcaccatgttggcgccctgttcccagccggtgaaataccagagaccgcacagcagggcgtaggtcgtcaaaattccggcgaacatgcgcaccgccatgccggtatccggcggcggcgagaagacgcggctgcgcatcatctgcgcctgcagcgccgcgggcagcggctcgccgtccaggaatgcgttcaactgctgtacctcggcccacagcgttaaccactgctcaacctgttcagccagctcgtcgacgatcagcgtttcccacggcgacagcgacgctgcgggtggcaacaagctcaccgagggggcagcgtgcggtgcgggttcaacggcctgccgccggacctcattcagccacggctgtaggcgggggcgcagaccgaccggcagtgcggcgatgctgctgccgatggccgagagcagcggcacgatttgcagtacgcgttgctgtatcgaaatcgccgcctgacgggtgggcttatcgaccgaactgtcatagccaagggtggtcatcatctgattgaacgaggcgatgtcgcccagcaaacggatacggtccgcgtcggtctgggcgtcgccgcccttaccgtcgaggctgtcctcctgccaacgcgctaggtcagacagccaggctttcagccgcgtgcgcagcaccggctccagcgacgatgggaacaacacgctgtctaccagcgtcaccgccaaaatacccaggcagatctccgtcacccgcgtgacgaccatggtgaacatcgtgtccgggtgattgatgtaggcgatagcgaccagcatcatggtgatggcgcccagctggaaaaagtaagcgcgcggcgtgcgatcgagataagagaggcccagcatcagtgacgatgacagcccagcggcgacgatcaacagcaccggcgtgttgctaagccaggccgaaagtcccagcgtcagcacgccggcgaacagcgtgccgcaaaaacggtaggtggcgcgggcgcgtacggcgccgctgaccggattgctcagcacgcagcaggtcaccattgcccaatagggattttgcaggccgatgctttccgccagcgcgaaggccagcatggcggaaataaacagtttcacggcatacagcagctgcggtttaccgattctcatggctcattgccggcctgttgcagatagtggcctgcgcgctcttcaaacaggcgcagaatgcgcgtggcggtttcaatatcttccaacggcacgtcgtgcatcagctcgactcgcagcttatcggccgcggtttcgacctttttagccagctcggcgccggcgggcaaaatgcgcagggttttaaaccgacgatcgccggccgactcctgccgctcgaggaagcctaacgcggcggcctgatccaacagacgcaccagcgcaccgggattgacgccgacttcttccgccagatcgcgctgattgatgccctgcggattgcgatgcaccagaaccacgacggtagccaacgacatggagatgccggatttggcgatcgccagcgtcgcagcctgtttccacacccggcgaaccggttgcagggcgttggtgagggcatagagggatttttctttcgatgacatgggatacctcggcaaacagtgtatataggttaaatggcaacagttgctttggcaattaattttaaacaatcgactcagagacagaaggcaagacatatgtgacgtcgtcacataaaacagaagggctacataggcagcccgtttgaaaggtgggtattacagcgcctgaacggggttcatcgcagcgccggggaaggccgtatcctcaccgcgttcacgccacggcgccagatcagtctggcgatcgccgccatgcacgccgagccggcgtgtaactcgacgcaggaagagctggcccgcatcgccggctattcgctcaacgttccaaagggctggttggtagcaccgccatggaatacctctcgcattggcgtatgctgcaggcggcagatcgcctgcgggccggtaaagaaaacgtcgcgtcgatcgcctactcgttggggtatggctcggaaagcgcgttcagcaccgtcttcaaacgggtgatggcgcagtcgccgtttcagtatcagcggcaaatgccggccggggcgagtgaaccggagtgaaagggggcgccgcggccgtagccgccgcgcctgaggctacctgctgatcgtctgctgcaacgcctgaacggaagagtcgatgccggcatcgaccgacatggtcaagtcttccatttccagcgacacccagtcgttgtaacccatcatgcgcaccaccgagaagaattccttccaccactgcagatcccggccgcagccgacggcgacatagttccaggcccggccagctacctcgtcgatcggtttggtctccagcagcccgttgatctcgacgacgccgcgctccaggcgcacgtccttgccgtgtacatggtgaatggcgggaccgagggcgcgggctaccgcgatgggatccgcgcccatccagatcaagtggctgggatcgaggttcaggcccaccatcgggccaacggcctcgcgcagccggaacagcgtttccgggttccacaccagcatggcgctgaagttttccagcgcaaagcgctcgacgccgcacgctttggctcgggcgaccagcgcctgccaataggggatcgccacctcattccattgatagtccagacagtttttcaccgtaggcggccagctgacggtataggtgatccagttggggatggtgtcatgcgggctggccggcggcaggccgctcatcatcacgatcttcttcacccccagcaggccggccagctccagcgtattgtcggtttggcgcagatgacgctgccccagctcgcccggatcgagcggattgccggagacattgagcgcggcgatctccatgccgcggctggccagcgcttcctgcagctgccggcgtttggcggggttggccagcagttcctcggtatccagatggggcgccggggaccaaccgccggtggtcatctccacaccgcgcacccccagctccagcagccgatccagcatcggttcgaagggtaaatggcccaggctgtcggtacagaacgaaagtttcatggtgctttccttattggtaattaacccaggtggcgccgttgtcggcggaacgaacacagttctcaatccagcgcacgccttccaatccggcatcgatatccggatagatcagcgcggccagcgtctgccgatcgccgcgctgactggcgctgatggcgatggcgaacttgaggtaaatattggcccaggattcggccagcccttcggtatgcagcgcgccgagccgctcttccgccagggcgctgtcgtctagatagggcatgccgtggtgcagcgtctggctgggccgcccctggatctcatagcgtaattcgccgggtgtggaatcactccattgcaggctggcgcgtgagcccaccacgcggatgctttggctgtccatcgcgcccgcgttgatggcggaggcccacatgcgcccgacggcgccgttttcgtagtgcatcagcaccatggcattgtcttccagcggggcgcgggaacggataaagctctggcgatcgcacagcagggaggcaattttcatgtcgggcatgaccagctgtgagatgtagaaggtgtgggtagagatgtcgcccagcacaaaggaggggccggcgattttcggatcgacgcgccacttttgcgcctcgaacgtgtccgcgctttcattggcgttgaagccatgggtgtactgcaattcgaccatgcgtatttcgccgatgtcgccgttcgcgatcatggcgcgcatctgcatcagcagcggatggcctgagaagccgtaggttacgccgacgatcaggcctttctccgccgccagcgccttgatttctcttgcctccgccgtggtaaagaacagcggcttttcacagatgacatgcaggccggcactcagcgcggcgcgcgtaatttcatagtgggtgccgttgggggtggcgatggtcaccacctcaacgccatcttcgcggttagcttcttgctccagcagctgttgatagtcgtcatagcagcgttcggcgggcacaccgagattgacgccaaactcacgtccgcgcgccgcgtcgatatcaaaagcgccggcaaccagccgataggcggtattgtcgcgcagtgcgccggaacgatgcttgtagcccacctggctgaggcggccgccgccgatcatcgcccaacgcagcgggcgagggatgcttctttcaccatttaacatgctgactcctgatattgtggtattgcactcgggtgcaaaatgggttgaaaagagagtggcaacggtttatttctggttcatctgtgcaaattgcgggtagttttctcgcgtcacggtggcataaggcacccagttgtaagactcggttttggcgcgatccaacatcgctcgggtcacttgcaccgcgccgatcgcctgggctttggcatcctggaaaatggtcaccgccaggtcgccatttttgataaattgcaggccgtcgggcgtgccgtcgataccggcaaccagtacgccgttctttttggcctgcttcagcgccatgatcgcgccgatggccatctcatcgttgttggcggcgatcgcatcgatcggtacgccgttcagcaaccagccggagaccacgtcgaccgcttcattgcgctgccatttggcggtctgtttctctaccacgttcaggtctttgtgtttggcgatcaccgcctccaccgcgcgggtgcgttcgcgggtttcttcgttggagagggcgcccatcaggatcgccacgttgccgcggtaattcatttttttcgccagggcctccatctgcaggcggccgctgagcgccgaatcggagccgacgtaggccgtcgcgccgctcagcggcacttcgggtttgcggttgacgaagataagggggatagcggcgcgtttggcggccgctatcatcggctggacgccttgcgtatcaaccgggttgaggataatggcgtccacgccctgattaatcagatcgtctacctgctgcacctgcagggcgacatcgcctttggcatcgacgaactggccttgcagttgttgcgtagccagttctcgcgccatttggctgcgcaggatggagacaaagttgagatcgaaattggccagtgccacgccgacctgatagctcttggcctgagcggtcacgacaaacagcgagcaggctaacatcaacagcagtctggtttttttcattacggtatcctgttgagaagagaggtgttatgtaaaaacagcgtttttgcaaccgggtgcaaatcagaagaaaaaacgacaatgagtctctgaatgccaccgtgaatgtcgactatgaataaaatttggtcaacaggggaaaggtgaaaacagcgcggacgatcacaaactctttacgttttgcacccggttgcacagcaaattgcaatcgggtgcaaaaacgatacataattgcagctgatatgccggcaggcgcttaggggatctgagcgagcagggtatagtttaacttcaccgaagcagggatcgacgcaaccatgaaaaaacaccacaaagccaccgccagcgacgtcgccgaaaaggctggcgtctctaaatggacggtatcgcgcgcctttacgcccggcgcgtcgatctcggacagcgcgcgtgatagcgtgttggcggcggcggccgagctgggctatcggccaaacctgctggcgcgcagcctgtcgcaaaaacgcacgcacatcattggcgtggccatcgacgagatgaagaacccgcattcgatgatgatgctcgatatggtcaccaaacagctgcaaactcgcggttatatggcgctgctgctgaacatcaccgcgggggaaaactaccgggcggtgatggcgatggccgatcagctgcaggtcgacggcattctgttcctggcgacggtgttaaccaaagagtgggtggcgatcgcgcaagatctgcatcagatcccgctggtgcaggtgtgccgcaatacggaaagcgaacacattgatgtggtcaatatcgacggctaccgcgccggcgaagagatcgctgcgctgctgatagaacaagggcatcggcgctttggttacatgaaggggccggacacgcaaagcagccatttactgcgcatggaaggctaccgcgacagactgatggccgccggctttcggctggatcgggtgctcaccgccggccactacgatcgccaacgcggtttccagctgatgagcgaatacctgcaggcaacgcaggaaagcgagcgggttgaggcgctgttctgcgagaatgacgtgctggcgctgggggcactcgaagcgctcaggcaaacggcgccgtcgtccgcgatggccgtggtgggcttcgacgatatcgatgaggccggctcagccaattgggcgctgaccagctatagccaacgcatcgaccggctggttgaagaagccttgaatcgcctgatcgacaatcgcgccacggcagacggcgcctggcggcacggggaattgcgggttcggcggtcgcatttgggagataaacaggcgtgaggctttttcttttggtgacagcgtcactttggaggtttgatgagagctcatcgcgatacaaagaaaaaactctatagaagagaaagtgttacatccaaagggtccatcgccagcggtggtgaataccgttggggacgccatggcaaacaggcggacgatgagcagttgccgctgcgtgaaagcatgcatgggcggatacaacatggcatggattacacgccgctatttcaatttctgctcagtaaagtgggccaaccctggaatgaagtacatagcgaagcggttagtcgattggacaaaccagcacccattttttacctggtggcgctgcaccgtaaaaactggcggagctatgtctgctgtggtgaatctagctattacagcggactgtgtgtcgatgaacgcgggatactgcagaaagtgaacccggcatttaccgcagaagatgtgccggtgagatgccgttgttgcacctacacgttcaacggggaactcgtgcccgtcacggaaaagaactggcagaagccttatgagaaggagtcctgggaataatcaggtctcacgtctcacgagtgtcattctggtgcagattgactgccggagtttgccagatttcacgtagcgcgatcaaaaaggagggtattttgacccattttgcagagtggcacagccaaatccaggcgcttgaggttgaactgcatcagccgccggtgcggcgcgatccgcggcgcgtcgcggcattgctgcatgaagactttgaagagattggtcgttcagggctgcgttatgacaaacgccaaaccgttgcggcgctggaaatggaaactgaacatccgcatatttttgccgaaggttttaagctggcgcaaatcagcgaaggcgccgtgttgctgacgtataaaagttttcagcgtgatgcgcagggccacgccgttcgttgcaccgaacgttcatcgatttggcttctgacagccaaggcaggttggcagatgcggtttcatcaaggtacgccgactaagggttaaactgagatgggggcttaaacataaaaaaggatatccgcctgataaagccttgaaggtgaggtgagaaaggacgggcaggataatcccggtgcgtatccagtaattcaatttaacataatatacattatgcgcactcatatgcaggtatgtggattataccgtccaggcctgattcatggggtttctcttgtagccaaccaggccagcgccaactgctcgtgccgttgaatcaattcgtttttcaaccggccataagtccactggattttgccggcagtcttctgctgcctggtatttgattgccctgtattgctgagaacatcataatgcttgcgcagataatctctgaacgccaaatgtcagatcgcctgttcacttccagcaataaatgcatgcacgtgatgcgtgcgtttgccgtttcccttgatgtcgtaacgcctgcaggcaatgccgttctcgctacgcggcgtatatcccatgtcacgcatcctgtcattcaagctatccaacgccggcagactttcaacctccagcaatatatcaatccttgggatcgtgatgatgcgcgctgatattttccactccaataatgatgaccgggcatggtttccaatggctcatacctgccggtattggccaaaaaccccctgcttttttgatcgcgctacgtgaaatctgataaaacgtggcggctacgatactgcagatttctcccaaacgcgtcatttaagcgggcagtatttgcacgccaaatgcgcattggcgcgcgtttcattgctttcggcgcccaccacggcgttggctatactgaatggaaacattcttcctcgctccaggagcctctccatgtttgatcatgtgaaatttggcgtcagcgactttgccctcagcaaagcgtttttcctcaatgcgctggcgccgctgggcgtaaaaatcgttgctgaaggcgagcccggctatggcgtcgaactttgtcccgatcggggtaatgtgtcattgtgcctgtttcaaaccgacgaaaagccggcgcacctacacctggcatttgtcgcaagcagccgtgagcaggtcgatgcgttctaccacgccgcgctaaaagccggcggcaaagacaatggcgcgcccggtttacggcccaattaccatgcccactactatgcggcatttgtgatcgccccggatggccataatatcgaggcagtttgccacaattcgatggactagtgattttttcagttaaaacagcatattaatcacgaggtaatgcattggatttaacataacgcaattgtgacatcgtcacttaaagttaccccgtcacgtcaatccattctgctccggtgatgctggccagccgctgcggcgcaattctcacgcctgagttatcgctgccgcctgccggaagcacttcactgtagctgcacaggctgcgatcgcagtaaactctcaccgttgccggtgcggcaaaggggcaaacgccgccgggcggatagccggtcagcgcctccacctcctccgtcggcagcatgcgtgcctttacgccaaagaattgcttgtacttcttgttgtcgattctggcggttcccgccattaccagcagcaccacgacgtcgtttacacgaaacgaaagcgtcttggcgatctgcccgccctccacgccaaaggcttccgccgccagcgccaccgttgcggtgttctttgccagcaccgtcaccgtcgtctccggtgcgtgctcggccagaaaacgctgaacgcgttctatgctcatgccctgcctcctgatattgctaagccattgataatgccgaagtgatggtttcggttttaacatcgcatgctaaaaatgagaatcaaaattgttcaaatcgatgaatctgaacaaagctttaaggggccaacgccttttttatctatcatttttcatggagataaccgtatgaccacgcaaacgacagcaaggccttcagcggccgcggtggccgtctatgaatggctcaatccgataccctacggattttttaccgcggcgctcatcttcgacatcatctatgcctgcgcggcgaatattcaatgggtcaatggtgccagttggctgatcgccatcggcctgatttttgccattattccccggctgattaacctggtgcaggtgtggttcggcagcggccggctacagggctcatcggtcaagctccatttctggctgaatctgttggccatcgttctcgccattatcaacgctttcgtgcatagccgggatgcgtatgccgtggtgccgcaaggcctggtgctgtctgcgatcgtggtcgcgctgctgagcttcgccaacattctgctggccgtgagcgcccgcgcaaaataaggaggttttcatgaagctatcatccatcgcgattgcgctttcggccgtgttggcgctggccggctgcgataacagcgccgtcatttcgccggaacaacaaatggggcctgatccggcgttgccggcggcgcaagacttcctgatgccgccgatgcaggtgccaaagggcgtgggctggcagcaaaaccagatgccgaaagtcgccgaaggcttaaaaattgacaaggtggcagacggtttgctgcacccgcgtcagttgcttaccctgcccaacggcgatgttttggtggtggaggccaacgggccgggcaccgaagcggtcagcacccccaagcagctgatcgccgggctggttaagggcaagtcaggtaaagggggaaaaggcggtaaccgcatcaccctgctgcgcccaaccgccgacggcagttgggaaaagcatgtcttcctcgaggggctcgattctccgttcggcgttcagctgattggcaacaccctgtatgtggccaacaccggcaatatcatgcagtacgcttatcagccgggcgaaacgcacatcagcgatccgggtaaagagctggccgatctgccggacaccatcaaccatcattggaccaaggccctgctggccagcccggacggtaaaaagctgtatgtcggcgttggatccaacagcaacatcaccgaaaatggcctggccgtagagtaccggcgcgccgccgtgttggaagtggacaccgcctccggcgccagccgcatcttcgccagcggcctgcgcaatccgaccgggctgcagtgggaaccgcacagcggcaagctgtgggcgattgtcaacgagcgtgacgagatcggcgccgatctggtgccggactacctgacctcggtgcaggacggcggcttctacggctggccttacagctatttcggccagcacgtcgatcgtcgggtgcagccggcgcggccggatctggtggcgaaagccatcaagccggactacgccctcagctcgcacgtcgcgccgctggggctgctgttctacaccgcgagcgctctgccggccgactatcgcggcggcgcctttgtcagcgagcacggcagctgggatcgctcgccgctgaacggctaccgggtcagctacgtggcgtttgaacaaggcaagccggtcggtaaactcaaagcggtggtcactggctttgtctccgacgacgagaaggaactctatggcgcaccggttggattagcggtcgataaggctggcgccctgctgattgcggatgatgtgggcaacaccgtttggcgcgtcagcgctaaataacgttaacgtgcaggttccgaagaacctgcacgtgacatagtcactcaatgctttgcgccaaccagaccgttcttcccccgcaggcgggatcttccaccacatgatcgaccacgcggaagccgttctcttgcagcaagcgcgtatactcctccggcgccaggctggagtgaaacagcggctggccttcgaaattgccgatcgccacgccgtctgcagggccgctggtgaacatcagtgcggcattcggcttggcgtgccgtctgaacagtagaaacatgcggcgctgatcgtcgcgcgccaaatggaagaagctgtcccaggccagcaggccgtcgaatcttgtcgccagattcagctggcgcatatccatctgccgccactcctgctgtggaaaacgctgccggcagcgtgcgatcatcgcctgcgcaccgtcgatgccggtgactcgatacccttgttcaataaaataggcggcgatcggcgcgccattgccgcagccgagatcgagcagccgtgcattggccggggtaagctgtaaaaagcggtcgagccacggccgctcaaacagcgtggtgggtctgaggcgttcccaggcggcggcatgttcgtcataaagcggaataatcgtgctcgccagttcttccgtcattaatattttccccgttatgttattggcgcagtaaaaatagcctttggccaaaattaacgcgcttatccgataatatattcatcaacaggccgttgaccagaaataaaaggttttaacatttcgacataaaccagtacaattccctaccctgtgttaacccttttttaggtcgattgtgtcgttaattcagccccatgcatcgcgaaatcgggccgccgcctggttagggatgtttgccattctgatgttgttcattgcgccggtgatctcgcgatccctggagcatgcgcgcgccggaagtgctggaacggccgtcatggcggattgcggcatggatatgccgatacatcacgagatgcactcgccgtcgcctgaacctgaaaaagccgcgcagccgctgatgcagcacggcggcggccaccacaacatggcgatgatgatggacgacagcgcctgcggctactgcgtgctgttgttgcatgcgccgctgctggacgtgagccacgccccgctgttctggtccctgccgctggcttcacgcccgccgccgatccactatctcgttcccctgtttgcccacgtcgttcacaccgaattacagccgcgcgcgccgcccgtctctttcctctgatttaacaataagcccattgccgttctctgtattgccgttgatcgcttcaacccggcggaattaattcgcccaatggttaatcatcgagacgacattattagcccggttatttccacgttcagggaattaaccccccgtatttaccgatggtgattttcgccaggcctccccacgcctgaataatccctcggccaagaacggaaaaagttagcttaaggaaagatgatgtttaaacccgtttataaaaagaacgccgccacccgcgccattaccaccgccatgccgctgttcctgctggccggccacgcggcgcaggcgcatcagcaccctaccgacacacaggttaatgatggcgacgtgatcaccgtcaccgcaccactctactctccgctaaccatcgtgacgtcaccgaaaactccgcgccagccggtgcccgccagtgacggatcggactatctgaaaaccattcccggcttttctcagatccgcaacggcggcaccaacggcgatccggtgttccgcggcatgttcggttcgcggttgaagatcctcaccgacggttcggaaatgctgggcgcctgcccatcgagaatggatgcgcccacctcttacatctcgccggaaagtttcgatctgctgaccatcaccaaagggccgcagacggtgctgtgggggccgggatcgtcggcgggcaccgtgcgtttcgaacgtgaacgcccgcgcttcgacaagccgggcatcaagggcagcgccagcgtgctgaccggctccaacggccgctgggacgagaatatcgacgccagcctcggcgccgagcaaggttacttgcgggtgatggccaacaaatcccgcgccaacgattatcaggacggcacccatacgcgcgtgccgtcgcgctgggacaaatggaacggcgatctggcgctcggctggacgccggacaacgatacgctgttggaagtgaccatgggccgcggcaacggcgaagcgcgctatgccggccgcagcatggacggttcgcagttcaagcgcgaaagcctgggcatgcgggtggaaaaatccaacatcggcgaggtgctggataagctggaagcgcaggtctactacaactacgccaaccacgtgatggacaacgtcaccctgcgctcgccgggcagcggcggcatgggtgggcacggcggccatggcggcatgagcatgggcggccatggcgggcatatgatgtcctccggcatgacgatgcagctcgatcgccgcaccgtcggcggccgcgtgatgggcacctggcagtggcaggacgtgaagctggaaagcggcctggacacccaaaccaacacccaccgcagcatgagccgcggcagttgggaaaaagacgcccagttcaacagctacggcgccttcagcgaactgacctggtccaccagcgagcaggataagctgatcggcggcgcgcgtctcgatcgcaccctggtggagaacttccgcaacggaggcgatgcggagcgttccgacaccctgccgagcggctttatgcgccttgagcacacgctggccgagctgccgctgatgctgtatgccggcgtcggttataccgagcgtttcccggattactgggagctgttctcgccgaagctcggcccgaacggcagcaaggatccgttctccagcgtcaagagcgagaaaaccacgcagcttgatatcggcgcgcagtataacggcaagcgcttcaacggttgggtctccgcttacctgggccgcgtcgatgatttcatcctgttcaaatacgatccgcacaacgcgcgcctcagccaggccgataacgtcaacgccaacattatgggcggtgaaatgggcatgggctaccagctgagcgaacactggaaaaccgacgccagcctggcctactcctggggtaaaaacaccagcgacggccgcccgctgccgcagatcccgccgctggaagcgcgcctgggcctgacctacgagtacggcgactggagcggcaccggcctgtggcgtctggtcagcagccagcaccgcgtggcgatcaacgaaggcaacgtggtgggcaaagactttgccgatagcgccggcttcggcgtgctgtccgccaacgccgcctacaagctgaataagaacgtcaagctgagcgccggtctggataacatcctgaacaagacctacagcgagcacctcaacctggcgggcaacagcgccttcgggtattcggccaacagcgcggtgaatgaaccgggccgcaccctgtgggccaaggttaacgtcaccttctaagccgttcaccgggcgatgggcaaccgtcgcccggtcacgcgatatgcgatccggttcttaggatatgagttttaagtttttcccatccggttaggcggcgattactatcatcctcaggttaatcattgcccggagggaatatgcaaaagatcactcgttttctggccctgctcggcgagctgatgatcgaaaaagccgaagacaccgcaccacaggctgcccagcctgacgatcgtgacgacgcgttgccaccgcgccttgagcgtggtgttccgctggccgaccgcttcctgttcatgtaatttcccgcgctgtttccgctcacactgaacgcacgatatgttcgcgcagccactggtgagcgggatcccgatgcgagcgttcatgccacagcatagtcatttcaaaacccggcactgccaacggcggtttgagttgctgcaataaagggtggttgcgcgccagccgctccggcaacatcgccaccaaatcggactgcgtcagtaccgagatcacaaatagaaaatgcggcacggaaagcaccacgcgccgcgtcagccccacgtccgccagcacctggtcggtgatgccgtagaaaccgccgccgtccggcgagaccatcacctgctccaattcgcaaaattgcgccagcgtcaggttttcatgcagcttagggtgaccgactctgcccaccagcacatagcgttcactgaacagcgtacgctgacgcagaccgggcggcgccccttcgcgggtgtgaaacgccagatcgatctctccctgttccgccagtttggcgatgcgtgccggcgcggtttccagcaccgccagccgggtgccgggcgccgccgagcgcaaaccgttcagcgcgggcagcacgatggtggattcgccatagtcgaaggcagccactcgccaggtatcagtcgccacggcgggatcgaacggcgtggccggcgtcaccgccaactcaagcgccgccagcgcctgactcagcggttcccgcagctgttccgctctggcggtcggacgcatgccgcgcgggccgggcagcagcagcggatcgtcaaagatcgcccgcagtttggcgagatgcacgctgaccgccggctgagagaaattgagccgctgcgccgcgcgcgtgacgttgttctccgccagcagcgcgtcgagcgttaccagcagattgagatccagccgccttaaattattcatggttatacctggggtaacagtaattcatttctaatataccttgtgacgccctaacctgcagctctcaccccaaggagtgttgttatgaatgtattgattgtttacgcccacccagagccactgtcgctgaccggttcactgaaaaacttcgccgttgagcgcctgacgcaggccggccatcaggtccaggtgtcagacctgtacgccatgaagtggaaagcggcgatcgacgccgacgacagcctggaaggcgcatcagggccccgtttcgatccttcgctggattcccggcgcgcattcgccaacggcgtgcaaagcgccgatattgaacgggagcagcaaaagctgcgttgggcggacgcggtgctgctgcagttcccgctgtggtggttctcgatgccggcgatcctgaaaggttgggtcgatcgcgtctatgcctatggttttgcctacggcgtcggtgaacattccgatacccattggggcgaccgttatggcgagggtatgttggcgggcaaacgggcgatgctgatcgtcagcgccggcgggtggggatcccattacgccccgcgcggcatcaacgggccgatcgacgatattctgtttccgatccagcacggcatgctgtattaccccggtttcgaggtgttgccgccgttcgtcacctaccgcgccggtaagaccgacgagacgcgcttcgccgatctgtgcgagcggctcgggcagcggctggataatctgtggaacgccgatccaatcccatttcggcgacagaatgccggggactatctgatcccgcagctgacgttaaaggacccccttgcgccggggcaagacggctttagcattcacctgaaatagcgcgagccgctccccttatcgcggcgctgacacagcgccgcccccgaggaggagtttggcgcccaatcccatcatgaccacgcccgtaaatcgctgctgccagaccaacaaacggggactgcgggcgagccattgccccacggtgccggaggccatcgcgacagagcccagtgaaaggatcccggccagcttctgaatggaacctaaaacgagcaattgcaaccaaaccggcccgttttctgggttaacaaactgcggcagaaaagcaaacatgaacagcagcgacttaggattggtcaggctgttaatcgccccttctttcaccgcctgccacccggtcatcatccggggtttcagcacggcatcggaacgctgccggcttaccttcagcatttttatccccagccagaccagataggcggccccaacccaacgcaatacgtccaacgccagcggataagtatgcagcaaggtggcgagaccgagcaccagcatggaaacctgcaccatgccggcgacaaaaaccatgccgaaaacattgagcagcgcgatacggcggccttggccgataccccgggccagcgtgagcatcatgtccggtccgggagacagttccagaagggtgagtgcaacaagaaaagcaataaacgtttcggccgaaggcatggggttatcaccggctaatcataggagacggtaatcatattcctccccggacattcgcaacagcactatcaggcgcatccggggcgtatcgttaattcagggcggcgagaaatgcccgatagccctgcgcgctgctgtccagctcgtgctgctgaacctgctctgccgccccgtccgaagcggcttccttgccgtaaaaggcaaagaacgaagcatagtcggcccgcacgtaaccggcggtgacttcaaacggccggaagatttcctccagcgagtagcgataacgcccttcacgcgcgtaatcttctgcgcgcacgcccgccgtgaccgccagcgccagtttcttgttctgcatcttatagccgctgcgggaaccgtaggcccagccgtggtgagcacgtcgtccagccattcctccctaaaatgggcgtgttaccgaaacaataacaccaatgttaacccgcaatgtccaagtcgccctttttcaggatggattgaatatacgtatttttgcaggcaagcgagggcaaattacctcggtcaacaatgccatcctgatccaatactatgatctcatctgagtaatcaaatgttgaacgccggtgactgatattgatgacgatagcgaaaggataggctgattttatgtttttcagcacttctctttcatttacaatatccagtgacgaggtgacttcgtcgagaataatgatctgtggctgcctgagaaacaacctggccaatgacaggcgttgtcgctgcccccctgacaaggtcataccattatctcctatcggcaaatctaacaattcggcaggatcgttatacggaatatcattaaattgagctaactgcaacgccttgagtagtttttcatccgatgcatgtgggcacgaaatttgtaaattaaagcgaagagtatccatgaaaatatagtcattttgcgatacatggaacattaacttagctcgtgctttgtcagacatgccatttgttggcatttgattaacatatatctcgcctgagtcaggcatgagctccccagcaatcagtttagccagggtgcttttcccagccccgcttggaccggtcaaggtatagaaacctggggatgataacgttaagtccatgttatggattgcattcgttccatttttttcatacgaaaacaggacctttgagagcgtcacagagacactttcaccttggacattgttcatcaccggatgatcatttcggggaggggtgcccatatcagtaataaacttatacagtgataccgtggatttttgcattgcggtatacatggagccgatattctcaaggggggaagccaatagcataatgtaggaagatatcataacaaagtgaccgagcgtgatatcttgactcatgacgcgataaaaggagagtaagaaagtggcaccaaaaaatagaatgcttaaaatagactcaatcagcaggaaccggaagtcagccttaagcaaggcctcatgtttctcttctattgagttgagtaagtttttatatctagaaaacaaaaaatcataagagtcacaaactctaacagcatctatattcttaacactgtctgtaattatgctgtatttttttaccgaggatgaataaaaatcggaatacaaagtaacaattttcgggttaaatttcctcttcgtccacagatagataacaaagtaaagtacgaagagtaatgcgacaaccacatcaccagaaatcaatattattgaaatactaaaaaacaactgcaggagcggaggtaacaaattatgcgagatatttctcagcaacgttgtcagttcgtccactgcttgattcaaccgctgtgtgacatcaccggtattctcatttgtcgtcattttatttgaagtaaacaaacttttgaaataactatctgtcagactaatgacaacattgttacgcaacgacgttatcaaaataaagttaactgccgaggatagcttttttatgctcatcagtgcaatatagctaatggcaagaccaatcaccgcaacggataaactgtacgcttttacttcgatggcattgaccagatatgacataattacgggttgcactgagaacatcagcgtggtgataacggatattaatacaacatagacaaactgccattttaccgtttggcttgatgaagctttgaagtacctaaacaaaaacaaaagtttttccatattggaaccttttattttttatagtatggcggggccccaccatactttgcaatcaacggtcagataaagtattacctaacagaccacctcacttaactcttagaggtagtccaaccgtcacccttaccgacttgcgtatccgtcatcgttgttgtcttgatcaaaagcagatctttttcagttaacataaatgctcctttgtcgataaattagctaaatagcatgcatttttcactgcatgctatttagatcacttaatgatgaaccatagagcagatgaatacagttacagtaaaatcggatgatgttatcccactctgagaacaaaaatgcctcgcgtaaactgagaacatacccactacgtgctgcataacacagctcggtgagagggatgtaatcagatgatatattattcagcatcatgttaaaaaaaagcctggatgcacgaccgtttccgtctaaaagcggatgagcgtgtacaaacataacggaaaaaacaatagacacaaacaaacagtgcgtatcatcatttttcagtgcatacgcacgtaaggaatacaatgacacactaagcattgacatatcaataaactcggtgtacccaccctcttcatcagggacggttcttatattcccctgccgaataatgttagactcatcttttatttttcgcccggcatcactgataaacccaatgaacgattcatcactgagcagtttatctataaaaacaggttctgcatgctgatagaaagaaaactctttacgactggtcgcgttttcactggggaatatttttggatctacatgattactaaggcgatgttgcaataattttaccctgtctgtttttattgcctcaatagcattattgaccatttgttcatatccaatatttgtcctctttatcaattgctgagtcttacccagtaatacaagactatccttgtgaagatgacttacatcaggatatgcgaacggttgtaatttgatgacattaccatttagaacgtagtttcccatgcttcctttctctctatcttccctaaaacacccagcataatttctttttttttcataaatgcttcatgtttgttaatgttttatttcccccatccttctggctcattagcgccaacttcagtacgaacgctctgctcagcgggaaaaaatctgcgtgctgcatcggcaccatttcgtacaagacgctcagttcgacgcttaaagaactggaaaaagatcggctagtggtgagaaaggagtatccgcagatcccgcccaaggtggagtacagcctgtccgagcgcgggcgttcgctgatcccggtgatcgacatgatgtgccactggggggaacagcaccggccggaaccgccggtgccataaggggttaattgtccgccgccgctgaggttgccggcgcgggttcatcgtgctcgaccaacgcgtctgccggccggcactggcgcagcgtgcgcacgctgcaggccaccagcacgcccaacaaggcggcgaacgcaccgaacgacagcacgctcatcaacggggtaaacatcttgcccagaacgccgagccccagcgcgccgatcgaatcgccggtcacgtcctgtgcggtgccgaggctgttcacccgccccagcagatggtccggcgtgttgctctggatcagcatgaactgcagaagtgaggcgatggcattggcatagccgtagcacaccagcgccaacagcgccggcgccagatggctgaacagccccagcgatgcgatggcggtgaacgcgacgatcgcggcggccagaatcagcacgccagggcgagagaaacgccccacccagccgctggtcagcgcgcccaacatcgcaccgagcggcactgcggagtacatcagaccaatagaggacgcgccgacgtggtaagcgtcctgcgccagcgccgggaacagcaccctgacggcgccgacgatgctcatcaacatccccagcaacaccaccgagccgaccaccttattgtgccagacaaactggaagccgctggcgagcgcgcgcagcggatgttccggctcctgctgctgcggcagcagcgtcggcaagcgcaccagcggcacaagggtgcccagcgtcccggccgccgcgacggcgaaagcgagaccgacgccgccgaacacgatgataatcccgcccagcgccggcgccaggatcgcgccgatgcgcaccgtcaccatgctcaaggcccccgccgccgccaggttttcacgccccaccagcagcgggatcaccgccatcagcgccgtcatgcccagcgcgccaaagaatccgtcccaggctgccagcaggtagagcgcccacagcgacggcgccggggcgaaggcgttcagactcagggcgacaaagcccagcccgcaggtgccgcgcgcgaacaggatcagcttgcggcgatcgtagcgatcggcgagtaccccgcccagcatcaggccgataaacatgcctgcgccgtccagcgccaccgccacgcccacctgcaacgtggagccggtcatcgcctggatctgaatcggcacccccaccgccagcatgccgagggaaaacaccgacagcatgcgggcgcagaaaatcgcacgaaaatgcgcattgcttctcagcaaactgaaatcaagaaaaaaagaaggtctggccatagtgtcctgcatatcatgttttagtacgggtcgtggcgcacgccccggcccggttgcgttatatcaacccgtattgccgcgtcagcagcgaatgtaatagcggcccaagcgtctccagcgaggccggcgacaggatgtctgcgtgctcgcagccttggtgatggcagatcagcccatccagatacggcgcccacacggcgttgatatccatctctggcggcagcgtccggtcggcgacgaacagcgtcgccgtgccgtggaaacgctgactgcgcgcctgagaaagaaggcgcaccgcgtcgcggtagttggcgacaatgctgtcaaacatcgccgccttctccgccatcagcgccggatcgccatgatcttccgccataaactcggcctgctcctgcgccacctccttctgcgcctcctcctcggtggggccggtccagtcctggccttccggcggataggtatccagcatgccgaggaacgccacctcctccccctgctgctgcagacgcgcggccatcgaatgcgccagcgtgccgccgagcgaatagcccagcaggtagtaaggcccctgcggctgcaggcggcgcagagtggcgagatgacgatcgaccatctgctcgatatcctcgcaggtggcgatggcgccatccggccttggcgactgcagcccgatgatggggtagctccccggcagataacggctcagccccgagtactgccaggcgaaaccggaagccgggtgcagacagaatagcgccgggccttggccggcccgcagctgcaggcattcgccgatgccgcggctttcggccgagttggcggcctgcacgtcatcaagcagatgcgccatcttctccaggctacgggcgaacatgatttgcccgacggtcaatggccgagggacgcgccgccgcaattccgccgccaaacgcatcgccagcagcgagtggccgcccagtgcgaagaagtcgtcgtcggcgtacacgttttcacggcccagcagttccccgaacagcgccgccagtaggcgctcgctgtcgctgtgcggcgcgcggccgctctgcgggttcagctgcggccgtggcaacgccttgcgatccagcttgccgctggcgctgagcgggaagctgtcggtcatgacatagctgaccggcatcatatgcgccggcaaacgcgcctccagcgcctgatgcagtacggcggtatccagcgtcacccccggttgggcgatcagccaggcgaccaactgccgcatatcggcgccgcccagtcccgtcgcgccctcgcccagttcgatggcgtgcaccgccgcttgcgctacccccggctgcgccagcagcgcctgctcgatttcacccagctcgatgcgctggccgcggatcttcagctgatcgtcgctgcggcccaaatactcgacgctgccgtcctccagccagcgggcgatatcgccggtgcgatacatgcgagcgccgttgccggcgggatcggcgacaaaccgctgcgccgtcaatcccggccgatgcagatagccgtcggccagttgaatgccgcgcaggtagagatcgccggcgcagccgacgggcaccggccgcagcatggcgtcgagaatgctcagttgggtgttccagaccggtttgccgatcggcacgccggcgccgctcaccgccgccaatgcctcgccggacgccggttgataggtaacatcgaccgccgcctccgtcgggccatacaggttatgcagcggcgcggcaaccaatgcctgatagcgggatgccagttcacacgacagcgcctcgccgctgcagaacacgcgtttcaggctggcggcggcgcgctgcggcgcccgttcgttcagcgcctcaacccagatagccaacatcgacggaacgaaatgcagcgtggtcacgccatagtcgtcgatcaaggtcgtcagcgcctgcggatcgcggtgcgcctccggcggcgccatcaccaggcgcgcgccgaccatcagcggccagaagaactcccaaacggaaacgtcgaagctgcacggcgttttctgcaggaccacgtcctgcgcatcaagcgcatactcatgctgcatccagaacagacggttgacgatcgcccggtgattcaccaccacccctttcggccgcccggtcgaaccggaggtatacagcacgtaggcgggataatcgccgttccccgccggtgggcgcggcgcaagcacacgcccgctgtcatccagtgcatcgaaccgcagcgtcggcgccagcgcggcgaagcgggcatccaaggtgctctcggtgataatcagccgtggtttggcgtcctccaccatgtaggccagccgctcgtccggatagccggtatccagcggtagccaggcggcgccggtctgcacaatcgccgtcagcgccaggctgaggcgcacggatcgcggcaacgccaccgcgacgatatcccccggctgaatgccagccgccgtcagccgttcggccaacagcgcggcctggcgctgcatgtcacggtagctgaggctgtgcccggcgtcctgcagcgcgatgcgttccggcgtgcgccgcgcttgctcggcgatcgcctgatgcaaggtggtgtccgccaccgcctgcccggtgcggttgactgccgcgaccagcgcctgctcctgcggcgtttgcaattgccagcgcggcagcggcagatccggctgcgctatccactgttgcagcagcgccatcagccgtgcggcgaagcgttcaggctgcggcaccgaatcgcggtactccatcagcagacgcaggcgctcgcccggcagcaccagcagcgtcagcggatagtgggtatagcctttgttacggatggcatcgcagcgcaaggaacctgcgccgccaagcaaggcgtcgttgtccgggtagttttccaccaccaacagcgtatcgaacagcgtgcccgccccggccagatgctggatctcccccaagcccaaatcgtcgtgctccagcagttcaatctgccgatgctgcagttcggtcagttgatccgtcaacgaacggtcatgctgcagacgaacccgcaccggcagcgtgttgctgaacaggccaacgtgttcctcaatcccttctatctggccaaagcggccggaaaccggcgagccgaacaccacgtcctgatggccgcaacagctggccagctgcagcgcccagatgccctgcatcagggtattgagcgtcaacccgcgttcgcggcacagggtcagcaagcgcctttcctcggccggcggcagcgtcatttccaactcatgcacgcgatcgttatgcgattcaccgaacaacaacgtcgggcgcacatcctgcagcgtctcacgccagaggcggcgcgaggcgtcggcatcccgcgcggtcaggcggcgcacgatatcggcgtagttcgagcgcagcggcggcaacgcctgctcgccttcacgcagggccagcatcagatcgttgagcaccaccggcgtcgaccagccgtcgacaatcagatggtgtgcgttaaggaacagcgtgtagcgttcgctatcgccgtgtttgatccgcagcgcatgcaacatcgcgcccggctggttaaacagatcgcgctgcagctcttcctgttccagttcatgcagcgtctgcgcttcttgctcttcggacagcggcggcagcttacggctgtccagcggccaatggctttcctgcggtatcagctgcagcggttcgccctcgcggttgaaccgggcggccagctgcggatggcggcggatcaccgcattcagcgcttgctggagttgatgttcgtccagctcgccgcagaggctcaggcgcgtcagcgagttatagctgccgccctgctgcgccgtctgcgcatggaacagcaggccatgttgcaacggcaacagcggcagcgccgccgccaacggcccgcactcttgctcccaggcgcgcaccgtctcatcggcaacgttcggctgggcgatctcggccgccaccaacgttgccgccgcgcgttcgggatgacgctcggcaaactcgcacagtgaacgcaccgcttgctcgatgccgctgtgcagctgcgcaatgtcgctctcgctgaaaatcgcctccagccagctccagttgatcgccaggcaggcgccgtcgcgccgctcttcgacaaagatattcacctccaggccatacgacagcgcctgttgcgcatcctgcgccacggcgaaggcgtcgcggaagcgggtttggctgcgttgcggcgtccagtgcccctcatcctggctgaaacgcccgaggtagttgaacaagatctccggcgcattgcgctgcgccagcgccgccagttcgtcacgctgcggatgcagataacgcagctggccataaccgacgccgcgatcggccaccgctcgcgtcgcccgtttcaccgcacgcacggcctcattgtgctcagcgtcatgcagttcaatgtgcagcggatactccgccgtcagccagccgacggtgcgggccagatcgagtccgtcgtccagttctgcgcggccgtgcgactccagagagaaacgcagcgaagcggcctggaaacggcggcggcaggcctgagccagcgcgcacagcatgatctcttcaacctgcgcgcggtatccctgcggcaatgtgccgagcagcgcggcggtcagccggctgtcgagcaacgtgcgtttttccgatacgtcgccagtgcgatcgctaagcggatccagcgcgcgtcgccccaaacgcggtgcgccgtccgccagcatccgccgccagaacggcagctcggtttcccggcgttcagcgtcggctcgtagacgtgcagaccactcatagagcgaggtttcttccggcggcaaggtgatccgctgcccctgcatggcgctgttggccacctgccgcagctcgtcgagcaggatgcgccaggaaacgccgtcgactaccaggtgatggatcgccagcaccagccccaggctctgcccgtcgcgctgcaacaggatgccttgcatcatggtgccggcagccggttcgagatggtcaagtgcggcatcaaacgcctgttccgccgctaactccagctcaccggacacgctatcaacctgcatcagttcaccgccggcggcggtttcaaccaccaactgcccctcgcggatccgcgcgcccagcgccgggtgcgccgcacgcaactgctccagggcataacgcagctgttccggttgcagctcggcaggcacgcgcagaaaaacgccgtgcgcgaagcgacgatgcatatcgcccgtctcggcaaaccaatgcaggatcggcagcccgtcgatcgggccttgttgcacgctgcgcgcagcctgagagtctacggccagcggctgcatcgcctgcgccatgcgcgcgggggtgtgcagcgcgaagatctcgcgcggccgcagcagataccctttgcgccgcagggcggtgcccagccccatcgccgagatgctgtcgccgccgagcgcgaagaaatcgtcgtcggcgccgatgcgatccatccccagcagctgcgccatggcgccgcaaatcagcctttcctgctcggtggccggctcgcgaatgctttgcgccagcgtctcctgcggtttgggcagcgcctggcggtcaatcttgccattcacgttaagcggcagctccggcatcaccaccaggatcgccggcaccatataatccggcagacgttgcgccaactgccccagcagctcgctttgcagcgagggtgaggcacggcgcgcgtcatcctgcaccgagcaatagccgatcaggcgataggtggcgccgatcggctcggcgatcgctaccgcccgccccacgtccggcaaggcggccaaggcgctttccacctcacccagctcgacgcggaagccgcgcaccttgatttggtgatcggtccggccaatgaacaccagatggccctccgcgctccagcgcatcagatcgccgctgcggtacatcacttcgccttcggcgaacggattggcgacaaagcgcgccgccgtcagatccgggcgccgcaggtacccgcgcgcgatgcctttgccggaaatgtacagctctcccgccgcgccgatcggcaccggctgcaggcggccgtcgagcagccagacttcggtattggcgaggggccggccaatcaccggctgttcggcggccgtgaccggcgcgccgagggtatcgacggtgtattcggacgggccgtaatagttgtggatctccacctccggatgctgctgcatcaggttccacagcgtcggcgttgccgcctcgccgccgatcatcacgaacgccggcagcgggaactgccccttcagcaggccgcagtccaccagttgcgagaagaatgacggcgtgatgtccagcagatcgatcggcgtcttttgggtttgttcgagcagcgcccagggatcgcggcgcagctcctcatcgaagatgaccagttcgctgcccatcatcatgcagaacagcggttcccaggaggagtcgaaagagaacgaagcggtatggccggcgcgcaggcggcgcccatggcgagcctggaatttttcgatcgccgggccaaacagcgaggcctgatgcgacaggaacaggttcagcagcccgcggtgcgtggacatcacgcctttgggtttgccggtcgaaccggaggtgtaaatcatataggccagatgcgcctcgttcagcggcgcacgccgttcggcatccgttatcggcgcagcttcggcggccgcgcagcgcgccaggcacgctgcgtcgtccaggcacaatacctgtggcagatccggcatattggcctgcgtcgcgcggtgggtcagcaacatcgccggccgcgcgtcgtcgcacatcagcgccaggcgttcacgcgggtaatccagatcgagcggcatataggccgcgccgctggccaacacgccgaacagcgcgaccagcgtgtccaccgagcgcggaatgccgatggcgaccacgtcttccgcgccgatgccgctttcgatcagcactcgccccagctgcatcacccgttcggagagctgacggtagctgaggcgcacatcgccgcaggccaccgccagcgcctcgggctgccgctcaacctggcgctggaaagcgtccatgatcgacaccatgcccgccggcggcgtcagatgcgcgccgcgcccccaggccgcgagctgttttaactccccttcgccgatcaacgccagttgaccgttcggctggtgcggctgtcgcgccagttgctgcagccaatggccgatgcgctccgcgtggtgatgcaaggtgcgcggcgagtatttggccgggttggccaccaacgacagcgtcagcacgccgttgcgaaagccgatctcaaactcgagatcgtcgaccggccccatcgccagcgtatgggtaacggccgcctggccgtcgaaggacaaggcgctgtggtagaccttgacgttgatcaccgggccgtacagttcctgatggccgccgaccaggccgagatcgcgtttgatctgctccgcttcatagcgttgatggcggcgcgcctgtttgatttgcgccacggtcgcctggcagacgtccgccagcgacatctccggcgtcacattcagcagcagcggcagcacgttaaccaccgggccgaccgccgccagcgcctgggagcccatacggcgcatgaaaggaaaaccgagtgaaaaacgggtttcgccgctcatgcgcgccagatacatcgccagcgccgctgtgacgatatcggccggttgcagcgactgcagcgcgccatcgcgcagcgcttcgtcaaacagcgattccggcagcaccagcgcctgtttgagcggccgggcgcccggttcaacctcccgactctccgtcgataacgacagcggcgacggcaaatcgcgcagatgctgttgccagaattcgcccgcccgccggcgcgccggcgacgtttgccattgctgatactctgccaccaccttgccgaacggggtaaacggcgatgccgccggcgacagcccgtgtcgcagcgcgcgatagatatcggcgatccgacgggtgatggcctcgaagctgaagccgtccagggtcagatgatgaaagcgctggtaccagaaccagcgatcggcgctgacgcggatcaccgcatggcgatagagcggccgttcgccgtccgccggcagatcctgcgccagatcgtcgttcatcagcgccagcgccgcctgctcggcgtccggccgcgcgctgaaatcgaaccactccggcgcctgcacgcgtgcgggatcggctatcagcggtaaacgctgcaccggctggccgtcctgcgcctcaaagaatcgcgcctgaaccgtatccgcttcggccagcccctgacggatcgcgcgctccagcgccgaacgatcgatagcgccgtgcagttcggtgtagtgcgccacggcgaagctgttgcggcgcagcgcgatttggtcggcgatccagatccccggttgcgcagcaaccagcggataatcccgatactcgacctgagtatccggtaaagaaagcgtttctgacatggtgtctgtcctttccctcaaacggaatatatcgattgactgccaggcgcttaacgcgccgcatccgccgctttcagcgccgccggccgcatgtcctgccagtgcgtttcgatgtagtcgatgcactcgccgcgcgacgccggccccatcagcacgcgccacccctgcggcgtatcggcaaactgcggccacagcgaatactgctgctgcgcgttgaccagcacggagaaacggaggctttcgtcatcgaacgggttttgttgttcctgagtcattttcattacctgtctgtcaaaatgtgggattacttcattgcggaaagcagccggcgcacgccgtccaccaggccgccgcgccagcagagcgcgtcatgtccgccggaatacacgcggtagtcggcgcggtgcccggccgccgtcagcgcctggtgcatctggcgattgacgaattcgatgtccgcctcccgatcgccggcctgttggatcacggtgagcttgggtgccgccgcgttgcgctgccgaacctggcgtatcagccagccttcctccagttcgtggcgtttttcgaactgggtcacaaattgcaccgtaggccaccagaaagagccggactggctcagcacgtggccgaagcgctcgggccagtgcaaaccggcgtataacgccgccagcccgccgtagctctggccggcgaccacggtgcgcgccccagtctcgctgaacgcttcgcggcgctgcgcctgcggcagcagttcgtcgatcaccgcctgccagaagacggcgttgcagggcagctcgttttcccggtattcaccatcgatcgcatcgatcagcaaccagcacgcgggaggcaactgcccttttgcggtttcgttctcgatcaccggcagcagcgcatgcctttcgatccagttttggccgtcgagcagcagcaccagcgggcggttcgctttcaccgccgcgtcgccgctggcatacagccaaacgcgccgctggttacccagccgttcgctgtgccactgaaatcgctgtagccgcgcctcatccagcggccgatcggcagcctgccaggcgctttgatcgtcggcatccggtccttgcgccagggatacgggccgcgggcgatgagacggccccagcgagaggcgattcagcggatcggcgatcgccaacgggaacagcgatacccaccaggcacgctgctggcggtcgcgtaacgtttcgtcatcgctgaagacgggggggagatctcgctcggtaatggggatcaggctgtagctgccgcgccagcggcgatcgataacggccgagccgtaccaaacgtcggtgccggggagcctggtcaggctgctgggggacgtgctgtggtgatcggtaatgccgttgatatcggcgtaaacgcggcatatcggcgagtgccgttcatcgccggcggggtcgcgccatagccaggtcattttgacgtggcgttcgtcgagcgcgtcgacgatgggcgtgccctgcgcggcaaccttttgccaccacgcggattgccctgccgcctcttcacgcagccattgcgccgccaatccctcaaggtcgtttcctggcctcttttccggcaaaaactccatagcgcctcttacataacatgagtgatttttacaaaacctgacaatcgtattgatactcattatcattttcaatactatttgtcggatttttaccgtcgtgcacatacggcgtctccgcgtcgacgggtgaataccgctcgtcgatatttcggggtttatcagggtggcataacacacaacgcaggtatgcaggagagataatgaagattaaaaacaaagggatagctaacgggaatgcggaggcgatgtccgccaggcgtctgttgctgggatcggcgctggcgttattgcccttggcgcaacacgcgtctgcggcagcggacgaaacgattttggtgaccgccgacgcgcaaaacagcgtgaccgcgccggtcaaagggatcgtcgccaaagagagcgccgccggcaccaagaccgccgcctctctgcgcaagacgccgcagtccatctcggtggtcacgcgcgagcaaatgaacgaccaggagccggcgtcggtcgccgacgcgctgaactacaccagcggggtgatcaccacctaccgcggcaactccaaccgcaatgacgaagtgatcagccgcggcttccgctatgcgcccaaactgctcgacggcctgcactttggcctctcgagccaaaatggcggcgccgggcagatcgacccctggctgctggagcgcgtggagatggtgcacggcccggccggcgtgctgtacggccaggtcagccccggcggcgtggtggtgatgaccagtaaacgccctaccgcccagagcattcacgaagtcaaattcagcaccggcaaccgccatctggcggaaacggcgttcgatttcggcggcaaactcaacgacgacaacaccctgttctatcgcctgaacggtatcgccagaaccgaacatgagttcgtcaaagacagcaagcagcaacgggtggccattgcgccggccttcacctggctgccgaacgaagacaccagctttacgctgctgaccagctaccagaacgatccgaaagccgggtcgcgcaacttcctgccgcgcgccggcacgctgttcccgaccagcgcgggctacgtgccctatgacttcaacgtcagcgagcccagcttcaacaaatcgcggcgcgagcaggcgtcgatcggttacagcctcgagcacaacttcagcgatgcgctgtcgtttacccagaacctgcgcttcactcaccgcgatgaagactataaatatctggtctataacgtaaattctgacgttaacgaccacaccgtgacgcgcagggcgcagcatgaaacgcagatgaccaacgagtttggcgtggataaccagctgaagggcctgttcgataccggcgaggtgaagcacaccgtgctgggcgggctggattaccgctacagccatagcgattcgaagatgtatcgcgatcgcggcaacgattacccgatcgactgggccaatccggttcgccccagcattgatggcagcgcgctgacgctggtttccagcgaattgaagacgctgaatcaggtcggggtgtatctgcaggatcaactggagtggaataactggaacctgctgctgtccggccgccaggactggtcgcaggtcaacacccgcgatcgcaccgccggcggcaaagagcagacctacaacgatgcccagttcaccggccgcgcgggcctgctctacgccttcgagaacggcatttcgccgtatgtcagctacagcacctcgttcgatcctaacctgtatccgagcgcgccgggcgccgatccgctcaagccgaccaccggcaaacagaccgaggtgggcgtgaagtaccagatcccgggcggcaataccctgctgaccctctcctggttcgacattacccagcgcaacgtggcgtcctataaccgtctcacctccgcctatgagcagattggcgaggtgaaatccaaggggattgaggcggaagtgcacgctcagccgacgccggagatcaagctgaccgcagcctatacctacaccgacgtagtgaccaaagactccaactcggcggacgaaatcggccacagcccggcgggcatcccgcgccacgcggcgtccgcctggggcagctacagcttcctgagtggcgcgctcaacggcctgaccgtcggcagcggcgtgcgttacattggcgatgcgccggccgacgccaccggccagtacgacgtgccgcactacacgctgtacgacgccatggtgaagtatgacctcggtcaggcttcgtcggcgctgcgcggcgcggcgctgcagctcaacgtgcagaacctgacggacaagaaatacgtttcgtcgtgcagcggtgagtacgcctgcttctacggcagcggccgcagcattatcgcttcggtcaactaccgctggtaacgaaaatgggcggccagcgccgtaatgcgtgtcagttagcgtttttctgaaggtattggtgacgtatttcggtcgataaatgtgagatgcaccatgaaactcatgcgcctcgaccgagcaagggaccgtaggcgcggtcccttgcaacccgcgcctttgccctatcagacggttggctttgccaactgccctccctccgccatagcgcattgaggccggttgcgacaggcgtccctgcctgtctcacctgaaaccgccgtccatggcggtttcgcctaatgcgctatgcctgcgttcggcgtcttcaagggcgcccaacaccgcgctcatctccaacgtctctaccacaacctcataagcgacagatttcccggtagccgccagctcaggtgttgaccttgggcgcgcatcaccggctgccgagcaagacggcgttgtcaggggcaaccggccagggaaggccggttgaggcgagactaacagcgacgtttgtcgcagccgacccgcccgacaatgcagacgcggcgagggtatccgcatagcggacagacggtgttaagcgaaggcgcgggtgtaggggccgcgccttcggcccctacaattgccgttcattgtggtaacagagaaattcggggtatttacggcaatttttcctgcacggcgctgacagataccggataaaaaatgccagtcaggtttacggccagcgccgcccctttcttccgcctttctcgccgcctttactcctgcttcaattcccgcaagtgtttgtacaccgtggcgcgccccatcgacagcacgttggcgatgtaatccgccgcgcttttggccttgaacgccccctgatgatagagatcgctgaccagccgccgtttctgctcgcggctcagcgcgccgagcgcagcgttctcgcgccgcagccagtcatgcaggaaggtgttgatcttctcctgccagtcgtctttgaacagctgttgcggctgcggctgcaatcgcgtgaccgataaaaacatgtccagcgcattgcgggcgtcctcgaacatcgcggtgctcaggttgatgcacagcagatagctgggcttgccctgctcgtcgcgcgcggcgatgctcaccgaacgcatctttttgccgtcccagttcagcttttcataggggccggtcacgccggcgccgccatcgagctcgaagtcttccaggccggcgtcatcgcccggtttgcgcttcgacaggttgttcgccagataggcaatcttgttggtggccagatcgtggatcaccacttccgcattcgggaaaaacagcgcggcgatgccgtcggcgaccgatcgcaaaaggtcgagttgagaagaagagttcggcacgctgggggtctccgtatagcccggtttggtttgcggttcagccgcttagcataccgcagttgccgccgcttgccgagcggagcggcggcaagcggcgtatccttcaccggttattccgcctcggcgccgcgccgataaaacacgtagctctcgcgcgccacgctgtcgcggacccgatagcgccagatcaggccgagcgtggtaaaccacagcggcatgctgcacaacgcgatcagcgtatcgctatcgaacaccatcagcaccagcgtaaaggcgaaaaatgccagcgtcagccaggccatcgctaccccgcccggcattttgaagtgggaagcggcgttcagatccggccgcttctggcgatacaccaggtaggcgaccaaaatcatgccccagctgtaaaccaccaggatcgccgccacggtagagacaatggtgaacagcgtcatgacgttcggcaccagtaccagcagcaaggtgccggccaccatgcagaagcaggaaaacagcaggctgcggatcggaatggccgtggtgcgcgacagaatgcggaactgaccgtgggcgtgcttttccatcgacaggctgtacagcatgcgggtgctggaatacaccccgctgttggccgaggacatcgccgaagtcagcaccacgaagttgatcaccgcggcggcggccggcagccccgcccgatcgaacagcatcacgaacgggctgctgtccggcgagatgtggctccatgaggtgacggcgataatggtcagcatcgagcacacgtagaagacgatgatgcgggccgggatcgcgttgatcgccttcggcagcaccttctcggggtttttggtctccgccgacatcgtgcccagcagctcgatgccggtacaggagaaaatggcgatctggaagccggcgaaaaagccgaagatgccgtgcggcatgaaaatggcgggatcggtgacgttatgcagcgaagcggtcacgccgtccggcgaagtccagccgctgaacaccatccaggcgccggtagcgatcaacgcgacgatcgccaccaccttgatcatcgcgaaccagaattcggcttcgccgaacatcttgaccgacagcatgttgaacagacacagaaaccccagcgtcagcagcgccggcaaccagggcgagacgtctggcagccaatattgcacgtagccgccgcacaccaccacgtcggcaatgcaggttacgacccagctcagccagtaggaccagccgagaaaaaagctggcgcgcggccccaggtattcggagacaaaatcggcgaacgagcggtaatcgagccgcgtgagcagcagctcccccatcgctctcatcaccatgaacatgaaaaaaccgacgatggcgtaagtcagcacgatggaggtgcccgacagcgcgagggttttcccggcgcccataaacagcccggtgccgatggcgccgccgatcgaaatcagttgaatgtggcgcgcactcagcccgcgctgcaaggtttgggcacagtgaggcccctcggctgaacctgggttcagccgatcgcagtggttttttgtcatggtgttacctgtccgtcgttaaggcgattaagcaaccgatgcgcggttgcagcaggaatgaaacgcccgcgggcgctctaaccggcaaaaaaattgagaccaaacgctgcccgccccgttgtgacagggaggtaataataatgggtaccaagaaaatgctctcgtgagccgtcgtatcgcccacgtttggcgtacaaagcctgagcgtggtgggtaaacactacaatatcaaatggttatactttcccttgtgcaacaaaaaaacgacgccggagccgttttaacattaatttaactctggcgaggggaaatgccattgtcaacatggcagttaaataaaatgaaactttttgatcacattcaagcttctgaaaaatagataaaaagggtttttatgcgctttatatgcataaattatgcatgtgatcgctcaccgctgacaaaaagtaattaactattcatttaccgctctgcaggcggcgaaaaaccgtccgctggcccgatgagaggggggctaacaaccggcataattagtggtaaatttagcgtcgcaaagtgttatgcgcttgctaatccacggttaaacgaaataaatacctctaatatataaaggttggttatggaaaagctatcctacgcttcagacagcagcaccaccgcttgggctacatatctgcaacaaatcgatcgcgtcgccccttacctcggtgacctgtcacgctgggttgatacgctgcgtcaccctaagcgcgctttgattgtcgatatcccgctgcagatggacgatggcaccatccgtcacttcgaaggtttccgcgtacagcacaacctgtcgcgcgggccgggcaaaggcggcatccgcttccaccctgacgtcgatctgaacgaagtgatggccctgtccgcctggatgaccatcaagtgtgccgcggtcaacctgccgtacggcggcgccaagggcggcatccgcgtcgacccgttcaaactgtctgaaggtgaactggagcgactgacccgccgctacaccagtgaaatcggcttcatcatcgggccacagaaagacattcctgcgccggacgtcggcaccaacgccaaagtgatggcctggatgatggacacctactccatgaaccacggcaccaccatcaccggcgtggtcaccggcaaacccatccacctcggcggctccctgggccgtgagaaagcgaccggccgcggcgtgttcgtcaccggcagcgaagtggctaagcgtctgggcgtgcagatcgaaggcgccaaagtggcggtacaaggcttcggtaacgtgggcagcgaagcggcccgtctgttcgtcggcgtcggcgcgcgcgtcgtcaccatccaggaccactccgctaccctgttcaacgccgacggcatcgacctggtcgcgctgaccgaataccaggccaagcacaagcagatcgccggcttccctggcgccagcgagatcgcgagcgaagcgttctggtcggttgacatggacatcctgatccctgcggcgctggaaggccagattacccgccagcgcgccgaaatcctcagcgccaaactggtgctggaaggggctaacggcccaaccttcccagaagcggacgacattctgcgttcccgcaacatcaccgtggttccggacgttatctgtaacgccggcggcgtaacggtcagttacttcgagtgggtgcaggacatggcgagctacttctggagcgagtccgagatcaacgagcgtatggacaagatcatgaccgacgcgatggtccacgtctggaacaaggccgccgagaaagagtgcagcctgcgcaccgccgcttacatcgtggcctgtgagcgcatcctgaccgcacgtaaagagcgcggcatctacccaggttgatacccgtattccggcctgccccggcaggccggattttcctcagcgcaaacagcgtttcaacaccttaccggtactggtcatcggcaagcgttcgacaaactcgacgatacgcggatacttgaacgccgccagccgctcccggctccaggcgatcagcgcttcttcctcgatcggttcttccgtttccttcaataccaccaccgctttgatctcttcgcccagcgaaggatgctcgacaccgatcaccgccaccaacgacaccgccggatggcgaatcagcgcctcttcaatctcgcgcggatagacgttgaacccgccgcgaatgatcatgtccttggctcgatcgacgataaaatagaagccgtcggcgtcgcggcgcgccagatcgccggtgcgaaaccagccgttttccagcacctccgccgtcgcttcggggcgattcagatagcctttcatgatgttgtaaccgcgcaccgcgatctcccccacctgatcgacaccgtcgatcggctgcccggtgacgtcgagcaagcgaacctccacgccccagatcggttggccgatggagccgggtttggtcacgcggtgcggatggttaaaggtggcgaccggactggtttccgacagcccatacccttcgagaatgttgacgccgaagcggcgcgagaaatcctccaggatctgcaccggcaggctggcgccgccggacaccgccatacgcagcgtgctgcgcaagcgttcgatatccgtgtgctcatccagcgcattcaacagcgcccaatacatggtcggcaccccggcgaaaaaggtgatgccgtgccgttgcatcagcgcgatggcctgtgcggcgtcgaagcgctcgaccagcaccagggtggcggcggcggcaaatccggcgttcatctgcaccgtcgaaccaaacgtgtggaacagcggcaaggttaccaggtgacgatcgggattcgcctctgagccgtcgaacagccgcaccgatcccaatgcgttgagcaccagattggcgtgggtcaactccgcacccttggcccggccggtggtgccgctggtatagagcaccaccgccgtgtcgctttcgagcgtcgcggcagacgcgaactcagtggactgtgcggctatcgcctggctgaaacgctccccctcgagcggcagccgatcgccgataataaacacctcgcggcattgttccgccttcgccgccgcccgcagtgcctcttcccccaacggcagagtgctgctgccttcgaaacagaacagcgccaccgccgccgaatccgccaggtaatagtcgaattcggcgcttttaagcaaaatattcagcggcaccaccacggcgccgcttttgaggatgccgtagtagatagccggaaactccggccggtttgtgcaggccagcgccacccgttcaccgggctgcacgccgcgcgcgaccagcaaattcgccacccggttggccatttcattcagcgcccgatagctgagcgggatatcgtcctgtatcaccgccggccgctccggccaggtacgcgcactctcttcaagcaaggttgccagattcagcatcggggattctccctggggttgagcgacgagaaaagcgccgcagtatcacgagtatagataggcactttgcggttcgcattccaaggggggctgggctataccttaggcattccccctcctgcaggagttgtgatcatgagcaagaaaaagatcctgatgctggtcggcgactacgccgaagattacgaaaccatggtgccgttccaggcattgcagatgatcggccattgggtggacgccgtgtgccccggcaaagccgtcggcgactatatccagaccgcgatccacgattttgacggcgcgcagacctacagcgagaaacccggccaccgtttcaccctgaacgccgacttcgccgccgccaaagaagagcactacgatgcgctcttgatccccggcggtcgggcgccggaatacctgcgtctgaaccccgacgtgatcgcgctggtacaggcgtttgacgccgcgaaaaaaccgatcgccgccgtttgccacggtccgcagctgctggcggcggccggagtgttgaaaggccgcacctgcagcgcctacccggcctgcgcaccggaggtgcggctcggcggcggtcattatgcggagatcggcatcgatcaggcgcacgtcgacggcaatctggtcaccgccccggcctggccggcgcatccgcagtggctggcgaagttcgctgaggtattggagcagtaatgcggcgctaacggagctgctcgatcagaaaatggatgtcgtacagccagcgtttggcgcgcgcggagcgcaccagcatagacacgcacagcggccgggtgtgttctttacaggcggagggagaaaaccagcgcccggtattgctcggcggctggaaatacagctcgtggttatagttgccgctgtcgacgccgaaggtgtcgaagtagcggcgcatcagcgtgttggagtcgctgaacgacagattgagcacggtgttaatctcggtttccggggtgatggccacgcccttctgcagccgccctgatgcgttgaaggcggcgataagcgcgatgacctgttgctgaatgtcttctgccatgacgacctcgagccgatatgaagaaaatgtgaatacaattgtctgactctgcccgccgcggcgagttcgggccgccgcgcgggttttccgtttctttacactttccataaaaaacgcgcgcagccaaacgcccggcgcgcgcggtcgaaggttagcggctgagcgtcgtcttgtcggcgatgacgccatccccctgccgctcggcggcaaccccgccgcccaacactttatacagggtcgcctgattatcgtacgccgtctgctgtgcggcgatcagcgactgctgcgccgtatacagcgtgcgctgcgcgtccagcacggtcagatagctgtcaacgccctggcggtagcgcagttcggccagacgataatattgctgcgccgccgccacatagccggtttgcgccgccagctgctcccgcagcgtggctttgcgcgccagcgcgtcggcggtttcctgaaatgccgtctgcaccgctttctcataggtggcgacatacagatctctctgcgctttgctgtagttcagttgcgacgtgttatagccgccgctgaaaatcggcaggctgatgctcggggcgaatgaccaaacgcccgcgccgtggctgaacagcgacgagagttcaccgctgcccaccccgccgctggcggtcaggctgatcgacgggaagaacgccgcccgcgccgagccgatattggcgttggcggatttcaggttatgctccgcctgcagcacgtccggccgcgtcagcagcacctgcgaagaaaccccggccggcaggtcgcgcatgatcccgcccagcgcgtcgatgccgccgggcagcaggttttccggcacgctttgtcccaccgctaaatccagcgcgtttttcgcctgcgcggcgctggtcgcatagctggcggcgtccgatcgcgcctgttgataaacggtctccgccgacgccacgtcgaccagcgacgagatgccgtgctgctggtttttgcgcgtcacctccagcgaccgtttggcgctttccatcgtctgctgcgccaccgccagattgctgcgctcggccgccaccgccacccagtcggtgacgatgtcggcgatcaacgtcaggcgggtgcttttcgccgcctccgagttcgccagataggtttcgaacgccgcccgcgacaggctggcgtttttgccgaacagatccagctcaaaggcgctgacgccggcctgcgcttcgtaactctggctgatggcggtggcattgccgttgccggtcagcgaacgcccgcgactgccgtcggcggtggcgttgatcgtcggcaacagcgctgcccgctgctcaccgtacagcgcgcgcgccgaggcgatattggcgatcgcctcgcgcagatcgcggctgctgctcagccccatcgccaccacctggcgcagcctggcgtcctgcacatagtcgcgccaggcgacgtccgggtagctcaacgcctgcttgccggcggcctcgccctgcggcaggttggcgggcacctgcgccgccgggcgctggtagtgcggatccagcgacagacacccgctcagcagcagcggtaaagttaacatcatgactcgttgcaacacgttattctcctgcctgcgacggcgagttggcgggccgacgggtaaacatgcggcgcaccagcacataaaacagcggtacgaagaagatcgccaaggcggtggcggtgatcgtgccgccgataatgccggtgccgatggcgattcggctgttggcgccggcgccgctggataccgccagcggcagcaccccggcggtgaacgccagcgaggtcatcaggatcggtcgcaggcgcatgcgcgccgcgtggaccgccgcgccaatcagcgtttccccccgctggtgcatctcctcggcgaactcgacgatcagaatggcgttttttgccgacaaaccgacgatggtcagcagcgccacctggaagtagatgtcgttttccagcccgcgcagcgtgatcgcaagcagcgaacccacgatgcccatcggcaccaccaacatcaccgcaaacggaatcgaccagctctcatacagcgccgccaggcacaggaacaccacaatgagcgaaatggcgtacagcgacgatgcctgaccgctggtcagccgctcctggtaggagagcccgctccaggaatagctgctgccggcggagaacttcaccgccagtttctccatctcgctcatcgccgtgccggaactgacgccggcggcgccctgcccggtgatctcgaacgacgacagcccgttatagcgcgacaggttttccgggccgtagatccagtgtgaggacgcaaaagcggagaacggcgtcatgctgctgtcgcccgccgcgttggtgccgcgcacaaaccatttgtcgagatcttccggcttggcgcgatacgctacgtcgccctgcatatagacttttttcacccggttgcgatcgataaagtcgttgacgtaggtgctgccgaacgcgctgctgagcgtgctgttgacgtcgccggcgctcaggccgagcgcctgcagtttgccgctgtcgatctccacctgcagctgcggcgtgtccggcaaggtgttggcgcgcaccgccagcagcgacggattgccggcggcggcggcgacgatctgatcgcgcatcgtctgcagctcggcgcgggtggtcgcccctttggcctgcagctcgaaggtgaagccgtcggactggccgaagccgtcgatcgccggtgggctcatggagaacacctgggcgtcgcgcagcgaggcgaaatgcgccatggcgcgcttggcgatggcgtcggcggtgttttcactgccgccgcgttggctccagtctttgaggctgacgaacgccatgccggcgttttgcccgctgccgctgaagccgaaaccgttgatggtgaaaatggtgctgacgttggccttttcctggttgaggaaataggctgtcaccgcttcgctcaccgccgaggtgcgcgcattggtggcgccggccggcaaggtgtactgcaccatcaccgaaccctgatcctcattgggcaggaaaccggtcggcaaacgcagatacatcacggcggtggcgatcagcagcaggccgtacagcagcagatagcgcgtcggccggtggatcaccccgccgaccttgtcggcgtacttctcctgcagccggttataaccgcggttgaatttacccagcagccctttgtcggtctgttcttcatgcgacgctttcagcagcgtggcgcacagcgccggcgccagcgtcaacgccagcaccaccgacagcaccatcgaggagacgacggtgatcgagaactggcggtagatcaccccggtggaaccaccgaagaacgccatcggcagaaacaccgccgacagcaccagcgcgatgccgaccagtgcgccggtgatctcgcgcatcgatttctccgtcgcctcgcgcggcggcagcttatcttcacgcatcacgcgttcgacgttttccaccaccacgatggcgtcgtccaccaacagcccgatcgccaataccatgccgaacagcgtcagggtattgatcgagtagccgaacgccgccagcacgccgaaggtgcccagcaacaccaccggcacggtgatggtcgggatcagcgtggtgcgcaggttttgcaggaacacgaacatcaccaccactaccaggaccaccgcttcgaacagcgttttcaccacctcctcgatcgagatgttgatgaagtcggtgctgtctttcgggtaggccaccttataaccctgcggcatcgcgctttggtattccgccactttggccttcaccagtttggcggtattgagcgcgttggcgcccgccgccagcttgaccgcgatccccgccgccgggtggccgttgaggtgcgcgctggcggaatagtcttcgttgccgagctcaacccgcgccacgtcgcccaagtgcaccagcgcgccgctgctgtcgcttttcaggatgatattgcggaactgttccggcgtttgcaaccgcgactgcgccttcaccgtggcggtcagctgctgatcggcggcggccggcagatcgccgattttaccggcggatacctgggtgttttgcgcctcgatcgccgtctgcacgtcggaaggcatcagcgcatagctcgccagcctggtcggatccagccagatgcgcatcgcgtattccgagccgaacacctgcacgtccccgacgccctcgatgcgcgacagcggatcctgcaggttgctgaccagatagtcggaaatgtcggccatcgtcgccttgtcggtctcgtcatacaacccgacgatcagcagaaagctgctctgggatttcttgaccgtcacgccttgggcggtgacggcgctcggcaagcggctttccgcctgctgaactttgttttgtacctgcacctgcgcgatatccggatcggtgccctgatcaaaggtgacgtcgatgctgaccgagccgctggagctgctggttgaagagaaatacagcaggccatccagcccggtgagctgctgctctatcacctgggtgacgctgttttccagcgtttccgcgtccgcgcccgggtaggtggcggagatggaaatctgcggcggtgacacgtccgggtactgcgagatgggcaacgaattgatcgacatcaggccgcacagcatgatgatgatggcgatcacccaggcgaacaccggccgccggataaagaactgcgccatatcactgctccccgcgttggtttttgtcgaccgagacttcaaccggcttcaccgcggcgccgatcgtcaccttgctggtgccttcgacgatcaggcgatcgccttcgttcagcccgctgccgatcagccagttgctgcccaccacccgttcggcgctgacggtgcgctgcgccactttgttttgctcgtcgaccaccaacgcggtggcttcgcccttggcgttgcgggtgatgccctgctgcggcgccagaatggctttgggatcgacgccgttatccaccgtggcatggacatacatgccgggcaacagctcatgttcggggttggggaacaccgcgcgcagcgtgaccgaaccggtggcctcatccaccgccacctcggtcaactccagcttgccggggtgggcataagacgtgccgtcctccagcttaatggcgaccggcgtgaccgcgccgcgctgtaacgccgcctgttggcgccgcagtttaagcagttgggcgctggactgggtcagatcgacatagatcggatccagcgcgcggatggtggccaaggcatcggtctggccggcggtgaccagcgcgcccggcgtcaccgacgaaataccgatgcgcccggcgatcggcgcacgcacctgggtatagccgagattgatgcgcgccgtctccagcgccgcctggtactgcgccaccgccgccacggcctgcagatacgcggctttggcgtcgtctgcgtcctgtttggaaacgccgttttctttgaccagcgccgcatagcgctgcgatttgagccgggtggattgcaccgtagcctgggcgtttttcaactgggcggcggcctgatcgtagctggcctgatagctggcggggtcaatttgatacaatacttgcccggctttcacctcggccccttcggtaaacagccgctgcttgatgataccgtcgacctgcggcctcacgtcggaggtcatggtggcgttgacccggccggtcaactcgctgctcagggtcactgactggccgcgcagcgtgaccacgccgacctcctgctcaccgcctgcgcccgccagcgcaccggcgttttgcccatcgcagccggccagcaacagcgacagccccagcgctaaaagcgttttcctctgcattgcaatacgatcctattgagaatgactattctcaatatatcgaatgccgcaatgcgcttctgaaagggttgcgtaaggattgcgtaaaatcttttcgggctggaaaatgcgcagcgcggtgggtttatcctaatctgcgcgcaagcgtcagcgccaaaatcgtggcgatgctgatacccgccgctcccaggaaaacggcggatgaactgccgggaatgaacgccataaaggatgacaagaactggccggagaaaatcgccatcgataaataggccagatttcgcccccgggtgcggggggagcttttttctacggtcatatgattaaccaacggcaccgagaagccgaacccgcatcccatcagaatgccgccggcaacaaatgccgcggtgccgtgcgcagaggcgaagagcagatgcgctgcggcataacagacaaacgccgcgccaagcgcgccgttttctctgagtaaagccaccaacctgggcatcagcgcggcggcaaaaacggcgataagcgagataaacgacaagaagtatcccgtttgcgccgccccgatattcatgtggtggaaatgctgcgggatgataatgatcccggtgaagaagcagatcatggaaagcacagcggaaaaatagaccgcggttaatctgccggcgccggtggaaatggcatcatcgcgctgaacgttgtctgattcgcccacatcggactggggtttgggcacaaacagcaactgcatcgccagcaacacccaggcgacaagatacaacaggaagggccagcgccagccgagcgtcgccaacagcccgccgataaacagaaagatgacgccgcccagctcgatcgacatgccttgcgaagcgatcattttcaagcgcgcctgcccgctgtaaaaagcagaaatcagaccggtgccggctgacatcacgatcgccgtggcgccgccaagcagcaggcggtcgagcatcaccggccaaaagccgcgcagcaacagcccccccgacccaagcaggccatacaacaacagcccccagctgagcgccgcgtaagcgcccgccttgtcaataaaacgtccggcgaaggggccaaatatcaccacgcccaacgacggcacggtgaccagccaactggccgcggaaggcgtgcccaactggctcgcgatctccgtcaaaccgggaacgatcacgcaaccgaccatgatcgtcagacaggccacggccaagagcgtaaacgccgccatttttcttaattcacgcatagagtgccccactgaaatatccgatatatggatatgatatccacaattcggacggtattcttgaggcttctgcccaacatgtcaacgcgcgaactgtaaatcgaatgtcaatcctaccctgccaacgtcggcaactctccagttattacctgcaatggctggcaggcgctttttggcaatccatgcgctttgtcactcaatgagcgttgacatcgcctacatccggcaacagaataataaccactattcggatgagtgatccattattcggataattcgaaatcaatatcaaccacaccacatctcgctgccgtcaagtcggcgacaacctaagtgaggatctcatgagtaaagaaatttcacgtcgtaatatcatcaaacgcattccgctgttggctggcggcgccttgctttctcaatccctgctgtcttccgccatagcggcgccatcatccgccctaccggcggcgacgcggaaaggcgcgtttactgatgcgggcgcatcgctcgataagtcattgatttcctactatcaggtgccgatgcagaaacgcttgaagatcaatgagaaaggcattcagggcaagccctacgccgagttcttcgacagcaatctggatgcacccgtagagatgatccgcgcgctggaacaggggccgttggcaaaagaacacattcttcaacccacgaaagcgggcctgaaaaccctattggaacgttttgacgagtttccggtatcgggttacgccgtcgttgaggatggcggcccctgcgcctatgcgcaaagccgccatatttttccgggcgtgaccacggagatgttcaagtggtggttctgctggcacccgatcgaaagcgaacgctactatctgtggttccctcatgctcatatccacaactcggttgtcgatcccaagcgtctggcggatacccgtctgtcctacgctgagcggctgtacggcaacccgaaccacattaccgagtacattggcgataactatcttgacggcgttatccattttaatgcgccggaaagcttcggcgtcgagagcgagttgctcaaaaagcatcgctttacctttaacgccagcggcatcatcacgccttatgatgcgcaatcaacgccgctggtgctgatgattcatctgggacgcgacacgccgcaagggatggaaatggtcaaccgttactggatcggcacgcatgaatcctgggatagattcgacaagttcccggacggcggaaaacgctcgcgcgaatacatcgcaaaagcggggatgacgaaagcgtcgctggaagactttgcctatgaaatggccgtccacgatatgacggagttctcttcgctcggccgttttctgcctgagatttatgcccggttcggcaacagctgaccgccgccttccctcgccaacgcagcgccgggagcgaggcgtgctggccccggcgttcagcgcctgccgggccaaacgccccggcttgttatgccagcatcgcttcgatttccgctttgcactgcatcagcgaaccgagcagatggtcaaacttttcctcgaagcgcatggccggaaccgcaatggatatggcgtaaagctcgttgacgccgatattgaggtaaacgccgacgccacagacgccgcgagcgtgctcttcgcgatcgatggcgtaacgacggatcctggtttcccgaatgtcctccagtacggatgagacggttctgagggtattatccgttctgacatccggctggccgccaagcagatccgcaatcttttcgtcaggcagctcggccagaatggctttgccatgcgccgtgcagtggcacggaaaggcggtgccaacggctgatacgacgcgaagttcctgatcggaaacaaactggcctaccgataccgcgtggctgccgcggtaaacgcacaaatcgacggtttcacgcgtgcggcggccaagcgtttccatcgccggttttgcaagggtgatcacatccgtatgcgcggaagccgccaggcgggcgagcgccggccctaattgaacgccgccgctgcccatgatgagcagctgttgcgattcaagcgaggtgaccaaacggtgtacggtggtgcgcggcagccccgtttcccgggacaattgagagatggtcatgcccttcggttgagtttccagcgcccgcagcagggtggcggcccgggcaatcacctgtgagccgctattatccgcgtcattactcatcgtgatgttccacattgaatggggtcagggacgaaagaatatcacaggttgtccacatattggataggtggacaagatccatggaaaatcccccgcctacctgcctcatcacagataccaggaatttttagagcaacacagtgagataaaagcaatagctcccccccatgatattcaggatggcagtctgcccatgcttcatcatcgcgcaggcgcctacgccaacagcctcgcgtgcctacggctttttacggcttcgccaatctgaacaccgttttggtgtgccaatagtagtcgatcgccgccgcgatattcggcatccaagcgtccggctcatagggcacgaagccggaaaaacccagcctgcgggcagagacctggaaccccgcgccggagaaaatgcgtgcatagtcgtccagcgagcgatcctgcaccacggtatgcgtctgttcagcgacccttgcgcgccattgcggccacagcgggttgtcggtgtggcaaccggtcaccgcatagtaaacgccgcccggtttcagcgcccgcagcatatcggcggcatgctgcgcgatatcttcgatcaggtagatgacttcatggctgaaagcgatatcgaaatggtcatcccagcctgtcagccgcgtgtcggtttgataatcgatcggcaggtttcctttcaggcgattggcgtgttcgacggactggcgggcgatatcgacgcctagcccttcacgaaatggccggatttggtgcaacagacgcagaaaaccgccctgattgcagccgaagtccagcaccctgacgccggacagttcgtgttccggcaccagagttagcagatgccgccagataggcgcatggccttcggccatggcctgctctgcgtgcggatcgcgataccaggtgggaatgctcaaggatgagtcgttcatgatggcctccttatgtttccactcagccaaccacagcctatggcgacaaacaaccgtgcgcgcattttttgaacattcactgctctggtttgccatgcaccggcagctggctggtcacgcagtgaatgccgccgccgccggccgcgatggcgtcgatctccaactgcaccaccttgcgctgcggatagagcgccgtcagcagctcaaacgccgctttatccgcctgcggatcgccaaactcaggggcgatcaccgcgccgttgatcacgaaatagttgatgtagcccgccgcaaaatcgggattgtggcggctgaaacggctgtcgcgcggtgccagcggcggcgaaagcgtatgcacctgcagcttgcggccgtcggcgtcggtcgctgccttgaggatcgccagatgcgcctgggtaaccgcatgatcataagaggccggatcggtgtccaggttggccaccaccacgcccggccgcacgaaacgggcataaaaatcgacgtgggcgtcggtgatgtcccggcctttaatgcccggcagccagataattttgcgcaggccgagcatcgccttcagctcctgctccacccgatcgcggttccagcctggattacggtttgcattcacccaactgctctcggtcatgatgccggtgccgcgcccatccacctcaatgccaccgccttcccccaccagcgcgctgcggcgcggctgagcgacaccgtattttttggcggcgaacgccgccagacgcgcatccctggcatgccgctgcttatcgccccagccgttgaagttgaaatccaccgcgcccagcgcaccggcgtcgttgatgacgaaattggcgccaatgtcacgcatccagatgtcatccagctcggtgacgacatagctgatgttctgactgccgcaggtggcctccgccagctgccgttcgtgcgcgcggcaaaataccgtcagcggctgaaactcggcgatggcgcgggcgatgcgcccctgcgctgcctgcacgtccgccgtgaacccgccccagatggccttctgggcgccgaaggcgagaaacgcccgcagctggggttccccttcgtcgggcatccgccaggccggattaagcgcagcttctgcgtgaccgcgtaatggaaagcccaacgatgccgtcaagccgacgccggccaccgccgaaagctgcttgatgaaggtgcgacgcgatgacataaacgacctcttttaattaatttaaattcaaatggttaaccgaattcttcactctccggcacttgaatcccatgctagtcttcccctgccaccgcgacaaacgatatatttagtggatatctgattagacaggcttatcgataatgttaaaacactggccccctttgagcgcactgcgcggtttcgaagcggcggcgcgcctgggcagttttcatcaggccgccgaagaattgcacctgacccagtcggccatcagccaacagatccgcagcctcgaggcgtttttggaacagccgctgttcttccgcaccggccgcagcgtaacgctgaccgacgccggccacgatctgttcagcaccgcacaggtgatgctgcaacagttggccgtcggcattcgccgtttggatcagtaccgcaaacccaaccagctgatcgtcaacaccaccccggcctttgcccgccactggctcgcgccgcggctgggcgagttcaaccagcgacatccgcagatcgatctgtggctgttcaccagctttgaaccgccggatatggcgacggacagcatcgatctggcgatccgcgacgatctcagcgcgcaggcggactgcacctttaacgttctctgtaccgaccggctctatcccgcctgccaccccagcctgctggcgttggcgccggagcagcgcgtgaccttgcacggcgaacgcgagatggactggagccactggacggtggcgggcggcgcgcacgtcggccaacgcgacagcgggctgaacttctccgatcctggtctgctgctggacgccgcctgcaacggcctcggcatcgcgttggtcagtcagctgctggcgcaacacgcgcgtgaggccgggttgctgcacccgttaaccgagcaacgcgtgcgcggcgccaactgggcgtggctgctgcatcgcgacagcgaacacaatccgctcgcccggcacttctgccaatggctgcagtcggcgctgcccgccggcgcataacgcgtcacgtcacgatttgctactctggtcaggcgaccccgcctgaccgctgctaccttcaataaagcgccgcaacagcccgaagaaaacgcgctaacctgctgtttcaaaaataattagttgaattcacctgataactgaacatcgctaaaaggatcttctatgtctgccggtttattgaaaacgatagcgctgagcgtgacccttgcttgctcccttcccgccgcctttgccgccgatctgaccgccggcgcggtcgccgccccggatcagtatggcgccaaggtcgccgcgcacattctgcaggccggcggcaacgcggtcgacgcggcggtcgccaccgcctttaccctcgcggtgacctaccctgaagccggcaatatcggcggcggcggctttatgacgctgtacgtcgacggtaagccctattttctcgactaccgcgaagtggcgcccaaggccgccagcaagaccatgtatctgaacgagaaaggcgaagtgatcgaaaatctcagcctggtgggcagccgcgccgccggcgtgccgggcaccgtgctggggttgtgggaagcccacaagcgtttcggcaagctgccgtgggccgaactgctgacgccggcgatcggctacgcccggcaaggtttcaccgtagcggatcagcagtatcagtaccgtgaagacgccaacaagctgttcgccggtaaaaccaacttcggtgactatttcggcgccatgaagcccggcacggtgttcaaacagccggagctggccgccacccttgagcgcatcgccaaatcgggcgccgacgatttttatcacggcgaaactgcccgcctgctggtggcgcaaatgcagcgcgacaacgggctgatcggcgcggcggatctggccgactaccgggtgaaatggcgcgaaccgatgcgcatcagctggcgcggcaacaccgtgtataccgccccgctgcccagctccggcggcatcgcgctggcgcagctgctggggataaaagaagatcgcgccgccgacttcaaggacgtgccgctgaattcggcgcgctatatccacctgttggcggagatcgaaaaacgcgtgttcgccgatcgcgccgactacctcggcgatccggatttcactaacgtgccggaagcgcagttgatcgcccctgattacctgcaaaaacgcgccgccgagatcaatccgcaggcgatctcaccgaccgagcaggtacggccggggctggaaacccaccaaaccacccatttctcgatcgtcgatgccgccggcaacgccgtcagcaacacctatacgctcaactgggacttcggcagcggcgtggtggtcaaaggcgccggcttcctgctcaacgacgagatggatgacttcagcgccaaaccgggcgtcgccaatgcctttggcgtggtgggcagcgacgccaacgccattgagccgggcaaacgcatgctctcctcgatgagcccgaccatcatcacccgcgacggcgacgtcaccctggtgatcggcaccccgggcggttcgcgcatcttcacctcgatcttccaggtgatcaacaacctctacgattaccacctgccgctggcgcaggcggtggccgcccagcgcgtacaccatcagctgttgccgaaagacaccgtctactatgacagctttgcgccgctgaccggcaaaccggcggacgagctgaaggccatgggctacaccctcgaagaccagggctggaacatgggggatattcaggtcatccgcatcgatggccgcacgccggaaaccgcgtccgatccgcgcggccgcggcgtgggcctggtggtgaaaaagtaacgccccggcggcccgcctcaggttagacgggccgctacttccccgcattgactgccgctgcgccctttcttactcatctatactgaagcgacaggctcgcgtttgacgacggcggcgtctgccttccttcttagacgataacgacaatattaattttaaatcaatcacctgcatttatcgtaagcggtgtcggaggcaatcaataatggcgaaaagacgagcagtacccggtgtccatccctacgatgggcccgccggcggttggggcgcgctgaaagcgacggccatcgccgtgcgcacacagatggataccctggaagcgccggtgacgctgatgcgtaccaaccagcccgacgggtttgactgcccgggatgtgcgtggccggataaagagcatcgctccacctttcagttttgcgaaaacggcgccaaagccgtgacctgggaagcgaccagcaagcgcgtgacccccgaattcctggcgcaaaataccgtgacctcactgctgcaaaaaaccgattatcagttggaggactacggccgtctgaccacgcccctgttttatgacgccgggacggacaccctgcgcccgctggcctgggacgaggcgttccaacgcatcgccgccgtcttgcagacgctgccgccggaacaggtggaattttatacctccggccgggcgtccaatgaagcggcctacctgttccagctgtttgcgcgtgaatttggcagcaataactttcccgactgctccaacatgtgccatgagccgaccagcgttggcctgccgcagtcgatcggcatcggcaaaggcactgtctcgctggacgactttgacagcgcggagctggttatttccatcgggcacaacccgggcaccaaccacccgcgcatgatgggcacgctgcatgagctggcgcgcaaaaaagtgccgatcattgtgtttaacccgctgcgcgagcgggcgctcgaacgtttcaccgatccgcaaaacgtcatcgaaatggcgacctacagttcgaccccgatcgcttcaacctactatcaggtcaaagccggcggcgatgccgcggcgctcaaaggcatcgccaaagcgttgctgcagttggatgatgagcatggcaatgcgctggatcacgcctttattgccgagcacactgaagggtttacggctttcgacgccgatctgcgggccacccgttgggaagccattgaggcggaaagcggtctggcgcgtcaggatctggaacaggtcgccgccgcttacgcgaaatccaacgccaccatcgtgacctacggcatgggcattacgcagcacaataaagggacggccaacgtgcgcctgatcgctgacctgctgctgctgcgcggcaacattggcaaaccgggcgccggcatttgcccgctgcgcggccactctaacgtgcagggcaaccgcaccgtcggcatcaccgaaaaaccctcggccgaatttttggcgaagctggaaacggtgtttggcttcacgccgcccaaagcccacggtcacgatgccgtgaaatgcatgcaggcgatgatcgacggcgcttcgaaagcgttgatctgtctgggcggcaacttcgccgtggcgctgccggaccccgagcagagcttcccggcgatgaaagcgttggagttaagcgtgcatatcggcaccaaactcaatcgcagccatctgttggtggcgaaagaaaccctcattctgccctgcctgggccgtaccgagctggacctgcaggccggcggacggcaatcggtgacggtggaggattcgatgtcgatggtgcatgcctcgtccggcaaattaaaaccggcgtcggaactcctgcgttcggaacccgccattgtggccggcatggccaaaacggtgatgcccgccagcaaggtgccctgggatgagttggtcgaggattacgacgtgatccgcgatctgatcgaaaaaaccatccccggcttcgacaattacaacgcgcgcattcgtcaacccggcggttttcgcatgccattgccgccgacagaacgccagtggccgacggcgacgggcaaagcgatgttttcggtgttcagcgggttgcacgaagaccagattgcggcggaacaaaatacgctgcggctgatcaccctgcgcagccacgatcagtacaacaccaccatctatgccctggatgaccgctatcgcggggttttcggcaggcgcgatgtgctgtttatgaatgacagcgatctgcaacgtttggggctggagcatggcgacgtggtcgacctggaaacggcgctgcccggcagcacccagcgcctggaaggcatcacggtgatcgcctacaacatctcggccggatcggtcggcgcctactacccggaagccaacgtgctggtgccgttgcattacatcgatgaggagagcggtacgccttcgtacaaatcggtgccaatccgcgtgaagctaagatccaaagaggtgcgcgcggttaagatcgcttagtaggaatgctttggcccccacaggcatctgattgggggccatttttatccgactacggagcggcgtcctatttgccgttggccaattcaccgtacaccacctggccgcggaaaccgcgccgcacctgctggaacagctcgcggaacgccgggtaatcctgcgcctggcacagcgcttccttgccgcgaatggcgttcacctgcaggcggtgattgacggtcacctgctgcccgtcgcgccgccacgcgacgcgatagtcgcccgccgcattgcggaattgccgatctttcggaatggcgatgatcggcacgttggccggcagctgcagacggtaggtttcatcgtagcgctgcgcggtgcagtagaacggcgtttcgttgcccggcgccgccgtggtggtatacagcgtgcggaacgatttgccgccgggcgggttgggcaaggtcatgccgcccaccacgccgaaatcgacgtagtcgtccgccttgaagcggaagcggtaaccgaactgctttttgagatccagcggatcgctgttcatcgccacctcgccgctgccgtcgatgccggatgcggacatgatcgtcgcttcggcctgcgcccggttctggcggttgatctgcgagaagtagccccgcaggtcaatctcttccacttcgctcagccggcgctcggtttccccctgcaggttgcccgccttgtcgaacacgaaatcgacgctcaacgcgctcttgagcggctgctcgtcgctgcccggcgtgcgcgccagtttggcgtcgcgcgtcagcagcaccggcgcccccaggtcgccctccggcagttgcccgaaacgcgcccagggattggtggaatcgaggtacagtttgaattccggcacgtaggtgatggcgtgattgaagcggccaagcagcggcacgttaggcagtatcgggccttcatccatgccgatcagcaccggcgagctttcgatgcccttggcggcgagcagcgcctccaggatcaccacgtgatccttacagtcgccgtaatggttatcgagaatgctctgcgccgaattcggctccagcccaccattgcccaggtacaccgccacgtagcgaatgttttgcgccacccagcgatagagggcctccgcctgctcgcgccgatcgctgatgccggcggtaatgttgtccgccagcgcctgaatgcccggcgtcaccttcgccgccgcgccggccttcagctggtaggccttggccaactgcggccaatcgcggtaggtgctggccatgatggtcgggctgaaggtccagctgtccgccgcccagttttgcgccttcatcggcgcgctgcgcgaataatgccagcgccagtgcgcttggccgttgcggatctgcggctgggcgccgcccgccacgccgcgggtgaaaatatgcatcggcagcttggccggcgcctgcagggtcacttcggcgtcgtcgaactgatcgaaaacgctgaacgtctcccacaggccgaaatagtcggggaaatacggggtgttttgcgtgcggcgcagctcatacaccacgcgcgatcccggcgccaggttggagaacacgatgacgcgcactttgcggtcggcatacagcggcgccgtggcgctggagtagctctcctgggtgtagatgcggtcgggcgccacgtcgtggcgctggccgtcggcggtcagcgtataggcggcgaccacctcgagcgtttccattttttcgctgtagctcaggcggatctggctgaatttctcgatcgccgccttggtcttcagcagcacctcgtagctttccgtcttcacgttggtggcgttggcgttaacgcgataatccgcgcgatagcgcacgaagctgaaatcgttgttggccgtgtcgttctggccctgatccgccgcggcgggcggtgcagcggccaacacggtggccgggtgcgtcgccgtcaaaccggcgagtaacagtatggaaggaatagcgattttcatcttcggtccttgaagggcgttaagcagcgacaccgggccatacgtccgtcccggcgtcaaaacaggcgggcacactaatataattgagaatcattttcaataaacgaaccatcaacgcccgggttagccctgctcgatcaacatcacggcggtggtctccggctccagcgcttcgaaaatatgctcgcgatcggcggagtaactgatgtaatccccggcgctcagctccagcggctgatccgccggcccgaggcgcgcgcgcccgctgctgatgatcacatgctcgacggtgcccggcggatgcggcctcgagcatttcgtttcaccgggttgcacccgcagccggtaaatgtcgcgctgcgcgcccggtggacaagtggccaacagcgtggcggcgtagttgccctgctccgacagcgccggcgttccctcatgggcgcggatcacttgcaccggcctgctcggctgtgaaatcagccggctgaccggcacatccagcgccatcgccagcgcccacagcgtttccaggctggggttgccgctgccggcttcgagctgcgacagcgtggacttggcgatacccgcgcgcttcgccagttcggtaacggacagattcaatcgctcccgctcacggcggattgccgccgacaagaggccaatcggcgtgatgttctgcattaggctctcgctcattgttcgttataccattcaattgttcgtcttgacgaacagcgccaaccgtgttcatcataatgttcgattgttcattttaatgattaagcgacttcaccacaagcacggtcaggccgcgagggaaacgacatgaaaacgaaaacgcgcggcgcagtgcaaatgatcctcgccatgacgatctccggcaccgtcggttggccggtgatcgtgttagggcagccgcccgccacggtggtgttttggcgctgcgcgttcggcgcgctggcgatgctggccacctgcgccgcgcttgggcaactgaaatcaggcgccatcaaccggcggcagctggcgttcgccgtcctggggggcctcgcgctggtgctcaactggacgctattgtttgccgcctatgcgcatgcctcgatcgctgtcgccaccgtgacctaccatgttcaaccgtttatgttggtggcgctgggaacgctgctgttcggtgaaaaactgacggctaatcggctgggctggcttctgctggcgttcgcggggatggtgttgatcgtcaccggccggcagagcggtggcggcgatggcgactatctgttcggcgtggcgctggcgctgggcgcggccctgatgtacgccctggcggcggcgatcgtcaaacagctggccgcgttgccgccgcagctgatcgtgttgattcagctgaccgtcggcgcgctggcgctggcgccgttcgccggtctggcccaccttcccgcagattcgttcgactggctgctgctggcgaccctcggcctggtgcataccgggttgatgtccacgttgctctatggcgcgatccagaaaatccccaccgctctggtcggcgcgctgtcgtttatctacccggcagtggcgatcgtggtggactgggcggcgttcgggcaccgtctcagcctgttgcagctgctgggcacgctggccattctcggcgcggcggcgggcatgaacttcggctggcgatggccgcccgccgcgcaccgggccggtaaaatcggttaatcccgcctgacgggcaagctatgcacaataaggcattcgccttgtgtccggcgcggtgctatttatttaaaccgtgtagggtagaaggagtgttctatgtggcatcaccgcctgcaacggcgcatccgtttcagctactggaacgaactgtgcgtcacaaaaaaataagggaaggcggaagccttcccttttgtcattcaccgctcgggtcaaaaacggtcggttttcaccacctcgtcgaacggcagcttgccgatgcgcgggtaaggttgccccgccgccttgccgatagcgaccatcagcgcgatctgataatgcgccggcttattgataatctcgcccaccgcgtcgaaatcaaaaccgtccatcgggcaagagtcgtagccctgcgccttggccgccagcatcagcgtctgggcgaagatgccgctgctgcgcatcacctcgtcgcgctgcacctgcggcttaccgcgataatactgatcgacggccgggatcatgaattgctgcaccggctccgcggcctcggcccagacggtttttacctgtgactcccagctcgacagatcgccgcacagcacgaccagcatcgacgcgtcggtcacctgcgcctgcccccacgccgcctcgcgaattttctcgcgctgcgcgcgatcttcgatcagcagcgggcgccagtgctgcaggttaaacgcgctgggagcgccctgcagcgcgatagtcagcaacgcttttttctcttcgagcgtcatcacgtgctgcgcatcgaactgcttggtggcgcggcgctggcggattgcgtctaacgtattcattttactgcctctgtccatgtgaaaagctctattgtcgccaacgcggcgtggctgtccagcccccggcggctatttctgctcggtttcggcgcgcaagcggccgacctgcgccgccaggtccggccacggcgcctgaccggcgtaatgctgccgcaggtagttgagcaggatggcgatctgtgcgtcattcaggttatggcgaaagcctggcatatagcccagctcggcgttcgccggccgctgtatgccgtccagcaccacgcgaatggcgttgtccggcgcctcggcgaacaggttggtgttcagcgccagagacggccgcacccccgccatctgcgcgcctttttcctgcgcatggcaagccatgcaggcgccggaaaacagccgtgccccttgcgaactcaggggctcgacctggcgctccgcctgagcgttcaaggttgccgccgcggcctgcgccgccgcttccggatgatagctgcgcagatagacggcgatcgcctgcagatcggcctgcgacaagcgcgacagcccttcttcgatcaccggcgccatcggcccggcggcgacgccgtggttggccgagtagccggtgcgcatgaaatcgaccagatcctgctgtgaccaggcgagcggcgcgggcgagcggccggtcaacgccggcgccgtccagccttccgccacgccgccggccaggtgctcgccgccggttttctcaccgaacagcacgttgcgcggtgagtggcaggcgctgcagtgccccaacccttcgaccaggtacgcgccgcggttccagtcggcgctttgggctggctgttccggcaacgcgcccggcgtcaggaacagcaggttccaggcgaagatgccctggcgaatgttgaacggaaagtgcagatcggtggccggcggccggtacttgaccggcggctgcgacatcagataggcatacagcgcctgcagatcgtcgtcgcgggtgcgggtaaaggcggtatagggaaacgccggatagagatagcggccctggcgatcgacgccgtggcgcatggcgcgttcgaacgccgcgtagctccagctgccaatgccggtttccacgtccggcgtgatgttggtggtgtaaatggtgccgaaggggatctccatcgccagcccgccggcgttgcgctcgccgcccgcacgggtgtggcacaccgcgcagtcgccgagatcggccaacgttttgccacgcgcgatctgcgcctcgctgaaactgtgggtcgcatcggcggcgagcggcgcaatctccggctgccaactggcgaccacgccggcgactaccacggcgatcaccgtgacgccgccccacccgacgatttttttcatcttactcatctttgctgtccttgttcgttacggggggttaatggccggcctgagcgcgcagcgcggcgagcacccgcgccggtgtgaacggcacctcgcgcaggcgcacgccgagggcgtcaaacagcgcgttgccgatcgccgccgcactcggcaccgaggcggactctcctgcgcccatcggcgcttcgtccgggcggtcgatcagctggatatcgacctgcggcaattcgtcgaagcgcaggatcggatagccgccccagtccaatgacgtcacgcccgacgcgttgaaggtcacaaactctttcagcacccggctggcggactggataatgttgccgtgcacctgatggcgcaccccggccggattgatcatccggccgcaatcatgcgccacgaagattttatcgagcgtgatctgcccggaaaggcgattgacgctgagatcgcacacccaggccgcccaggcggcgccgaagccgggaaatttgctgtggaaatagcgcgcataggcgaagccgcggccgctcaccacttcggcgccggcggcgcgcgaccggtgcgccgggccgtcttgccagttcgcctggcgcttcagggcctcaatcaaggccactgcgcgcggatcgttcaggtaacgcaggcgaaacgcgatcggatcctcgccggcgcgccaggccagctcgtcgatccaggactcatgggcgaacacgttgggcagcgccgaaacgccgcgcatccacgaggcccgcacgatcggcgcggcgtcctggcaaatcacccgcatgtgcggatactcgtattgcggaatggcggtgcgatcgcccatctgttgcacgtcagcccggttggccaccttgccggtcaacaccagcggcaaggtcaccgcattgttggagggatagctggttttcaactcgtaggccgccactcggttttgcgcgtcgaggccgccgcgtacccggatcaactgaccggtgcccttcggctcccagccggattcctgttcgcgcatcagctgcacccgcaccgggcggccggtctcccgcgccaacagcgccgcgtccgccgagacgtcgtcggcgcagttgcggccatagcagccggaggcctccatgcgggtgatgtgcacctgctcagacggcaactcgagcagcctggcgatatctttgcgcagatcgtgcgggttttgcgtgccggaccacacctgcgcccgcccgtctttaacctccgccactgcgcaggaagggccgatcgaggcgtgctgatggtaaggccagacatagtcagcccgcacttcggtatgcagcaatgccagcgcgtcgtccgtgcccgcatcgtcgcgcagcacgcggtcagttttcgggttggcttccagtgcggcgggcagcgcctccggcgacaggtccggcaggccggcccagggtttccattcggttttcagctggcgcatggcggcgatcgcctgctcttcgcgctcggccacaatgccgatgaaatcgttgatcaccaccagtttcacgatgcccggcagatgcgcgatcgaactttcatccaccgacaacaggccgccgcccagcggcgcgctgctgtcggcgcctgcgtaaggcgggcgcaccacccggccatgcagcatgccgggcaaacgcagatcgtgcacgtaggtcagcgcgccgctcactttggccggaatatcgacccgggcgacggcgcggccgacatagcggttctgctgttcaccgttcagcggcacgtttttatccagcgccacgtgcagattctgcccgcttgccagctgcgcatagctcaaggaacgccccgggtgcttggtcacaaacacctgccccgccgccgccgtcagctggtcggccggcagttcgaaggctttggccgccagcgccgtcagcatatgccgcacctgcgccgccgcctggcgcagcggcaccgacgtcacctgaagggtggcgctggcgatagttggcccctgatccggcgtgcgttgcgtatcgccgaggatcatcgtgacgtgctcgaacggcacgcaaatttcgtcggcgacgatctgcgccagcgcggtgcgaatgccggtgccgagatcgacatggccattgaaggccgtcacccggccgtcggcggtgaggctgataaaactgtctaccctgtccagcggcagatcggcaggcgttggggcgggctcggcggcgaaggcgttaaacggcgcgggcagcaggctgctgaccatcaccacaccgccggcctgcaacagctggcggcgggtcagttcgaggcggctcatgcttgcctccgtgcagccagcagcgcgcgggcgcgttcggcggcgcgcaagatctcaagatgggtgccgcagcggcacaggttgtaggccagctctttcttgatggtttgttcatctgcatccggctcgcgttcgaacaacgcgaccagcgtcatgatcatgccgttggcgcagtaaccgcactgcgccgcctgctcatcgataaatccttgctgcaccgggtgcggcgtttccggcgtgcccaggccttccagcgtggtgacggattttcttcctaccgcggccaacggcattgagcaggagcgagcggcgacgccgtcgataagaacggtgcaggcgccgcactcccccaggccgcagccgtatttggggccattcaagtgcagatcgttgcgtaacacgtacaacagcggggtctcgggcgagatatcgccgagtggaaccacccggccattaacattgatttccatggtgaaactatcccttaaacaaacggatttaatccgtaacatcactgcggcgaataattgcgcagtgtgctaataattatcatcaaaagacttgataatgttaagggaatgtagccgccatggctttaacgaaaagtgggtattttctataaatttccgatagataagcccggttttatgattgcgtcccgtgattattggcgttcgtcaacgcggcctcggcaccgtcgaccaacagccgcacgctggcttcgaacagcgcgtctgcacccttatcctgcaaagtttcccagccttcgcacagcagcgggtaacgctggcgatcggcgtcattcagcgtatcgtccggctgcatttgctgctcttccagcacccagcctacgacgaagcgcccgacggcgaacagcaaattcaccgcgcgttcaggcgtcaagcccgcccggcacagcagcgccaccttggcctcgataatggcgaattgcggctcctgcggccgggtgccggcatgcagacgcgcgccgtcgcggtaagccagcagcgcccgacggaaattgctcgcattggtgacgacccaatcctgccagggcatgtcggcgggcacctcttcacggtgatccagcatgatggtttccgccatcgccttcagcagctcggccttgttcttgaaatgccaatagagcgtgggagattgcacgcccaaatgttgcgccaggcgacgggtgctcagagcatcgatgccgatttcattcagcagcgccagcgctccgcgcaggacggtttcacgcgttaaacgtatcgtagtatttttttcactcatctctctatcactgatagggtaactatggaatactcaatactctatcactgttagagtcacaatcttgaaaaaacctatgctggttattttgttgacggtgttgctggatgcggtgggcatcggtctgatcatgccgatcctgccggtgctgttgcgctcgctgggcggtcttgacgccggcagcctgcattacggtgccctgctggcggcctatgcgctgatgcaattcctgttttcaccgatcctcggcgcgttgagcgatcgcttcggccggcggccggtgctgttaatttcactcgccggcgccgcggccgactacctgctgatggcgttcgcgccgacgctggcctggctctatctgggccggttgctggcgggcatcaccggcgccaacatggcggtcgccaccgcttacgttaccgatattactcctgccggccagcgcgcgcggcgtttcggcctggtgggcgcggtgttcggcgtcggctttatcgtcggcccgctgctcggcggttcgctgggcgagtggcatctgcatgcgcccttcctggcggcggcggcgatgaatgccctcaacctggcgatggcgtttttcctgctgccggaatcgcgtaaaccccgcacccgcgccgccgagaaaatccgcctcaatcccttttcgtcattgcgacggctgcacggcaaaccgggcctgctgccgctggccggcatttatctgatcatggcgctggtttcacaggcgccggccacgctgtggattttatacggccaggatcgtttcggctggagcatgatggtggcgggcctgtcgctggccggttacggtgcctgccacgcgctgtcgcaggccttcgccatcggcccgctggtcgcgcggctcggcgaacgcaaggcgctgctgatcggcctgaccgccgacgcgctgggcctggtgctgttatcgatcgccacgcgcggctgggcgccctttgcgctgctgccgttcttcgccgcgggcggtatggcgctgcccgcgctgcaggcgttaatggcgcacaaagtggacgacgatcatcagggcgagctgcaagggacgctggccagcatgggcagcctgatcggcgtcgcggggccgctgatggcgacggcgctgtatgccgccacgcgtgatgtctggcccggcctggtctgggcgttggccgccgccctctatctgctggtgccgccgttgctggcgcgttcgcgcgagcgtgacgcggcatagcgtagagatccccttctcccgcttaagctcatttatggctaagcaaggcattattcagcataagcgggcgctttacacgccagtgcgccgctcattatcatcgcccttatcccgccgcaggaaaatttgaatgccgtttcatggcgttacgcccagcgcgtatcgctattgttcacttcgcctatcggaaaatcaggatgagaaaactcacaacgccgctgatcgccgccctgctgctgggcctgtttagcctgccggccggcgcgcaggagaaaccgcagcaaatcaccatcggttaccagaaagctaacatttttgcgctgctgaaataccgcggcacgctggaaaaagcccttgagccgcagggcgtcaaggttcgctggatagaattccccgccggcccgcagatgttggaggggttgaacgtcggcagcatcgatctggcggcgaccggcgacgcgccgccggccttcgcgcaagccgccaaggccgatctggtttatttggcgcattcgccgcccagcccgaaaaccgaagccatcgtggtgccgcaggattcgccgatccgctccgtggccgatctgaaaggcaaacgcgtggcgttgaacaaagggtctgacgtcaattacctgctggtgagcgcgctggaacaggccggcttgagctacaaggacatcacgccggtctatctgccgccgagcgatgcccgcgccgccttccagcgcggcagcgtcgacgcctgggtgatttgggatccctactacgccgaggtggaaacccgcgccaacgcccgcctgctgaaagacgcggagggcctggtgccgcactataccttctatctcgccagccgccgctttgccgaaacctacccggacagcgccaaacaggtgattcaacagctcggcgcgctgagcgactgggccaacgagcatccacaggaagcggcggcgatcctcgctcagagcaccggtctggatcaggccatttgggccagagccatcgcccgcatgccgttcggcagccagcgcatgtcgccggaggtgttcagacagcaacagcaattggcggataaattcaccgccatcgggctgctgccggttaaggtggatgtcaacgccgcccgctggtccgaagataagcccgaggcgccatagcctttgccgcgctttggttttagaaagcagaaaccggcattttgccgccggcatcagctggcctatgctaaccttgtgtgatgaaacgcggtttcatggcatgtcttccggaacgttttgctttaatttgttcgtcgtgaaccctgggccgcccctgactggtgcggcttttctttttgttcggcagtgccggcggcggcgaattttgctatggtaacccgcagataaatgtcccgttttcagccgccggatcaacccatgtttacccataaagcaatcgccgagctcaacgccctggagctgatggtttataactacgtcagcaaacacaaaaatcaagtgatgtacatgaccatccgcgagctggccgaggccgccggcgtatccaccaccaccgtgctgcgattttgcaaaaaaatgggttgcgacggttattcagaatttcgcatccgtttcaaactgtatctggagcaaagcgatgcgccgccggtcgattccggcatcggcgaaattctcagtttttttaaaagcgtcagcaacgacgaatttaatcagttactcgatgaagcggcgcatcatatcgccgccgccgagcggattattttcgtcggcatcagcacctctggcgccttggggaaatatggcgcgcgtttcttttccaacgtcgggaaattcagcacccatatcgacgatccttattatcccgtcaacagcgatatgtataaaaacgcggtggcgatcatgctgtcggtttccggcgaaaccgaagagatcctgcgtctggccagccaattcagtctgcaccactgcaagatcatcagcatcaccaacaacgaaacctcttcgctggcgcggctggcggactttaatctctcctaccacgtgccgcagcatttgatcggcggccatcacaatatcaccacgcagatccccgtgctttacattattgaaaccatcggcaaacggcttgggcatattaattcggcaaaataaaacaggctgtttttttattgtgacaaatcactttgtccggcgatttgttatatcgtgacatttcttttggtcttgttactctattggcaatgcgaacgttattatccttcattaaataagatgagacattgacgatgaaacagttgccgaaagattttctgtggggaggcgcggtcgccgcgcaccaggttgaaggcggttgggatcggggcggcaaaggcccaagcatcgccgacgtgctgtccggcggttcgcacggcgtcgatcgcgtgatgacagacggcgtgctcgacggctaccgttaccccaaccatgaagcggtggacttctacggtcgctacaagcaggacgtggcgctgttcgccgagatgggcttcaaatgcttccgcacctcgatcgcctggacgcgcatcttcccgaacggcgacgaagcaacgccaaacgaggccggcctgcagttttacgacgatctgttcgacgagttgctgaaatacggcatccagccggtgattaccctgtcgcacttcgaaatgccttaccatttggtgaaaacctacggcggctggaaaaaccgccgggtggtggaatttttcgtgcgctttagcgaagtggtgatgcgccgctaccgcgagaaggtgaagtactggatgaccttcaacgagatcaacaaccagagcaactaccgctacccgctgttcggctactgctgttccggcgtggactacacccaggaagacaatccggagcaggcgctgtaccaggtattgcaccaccagttcgtcgccagcgcgcaggtggtcaaactcggccatcagatcaacccggagttcaagatcggctgcatgctggcctgcgtgccgttctacccttattcctgcaagccggacgacgtgatgtacgccgtggaggcgatgcaccagcgctatctgtacaccgacgtgcagatgcgcggctactacccaagctatctgctgcgcgactgggaacgcaaagggctgaagatcgagatgcagccgcaggacgcacagatcctgcgcgagggctgcaccgactacattggcttcagctattacatgagcaacgcgctgcaggccaacgcggtggaaggcagcgacggcatgttcggcttcccgggcaacgtgccgaacccgcacgtcaaggcttccgactggggctggcagatcgatccggtcgggctgcgctactcgctgaacgtattgtatgaacgttaccagaaaccgctgtttatcgtggagaacggcttcggcgccttcgacaaggtggaagcggacggccagatcaacgatgactatcgcatcgactatctgcgcgcccatatcgaagagatgaaaaaagcggtgattgaagacggcgtagacctgatcggctatacgccgtggggctgcattgactgcgtatcgttcaccaccggcgagtacagcaagcgctacggctttatctacgtcgataaacacgacgacggcaccggcacgctcgaacgttcgcgcaagaaaagcttcgactggtatcgccgggtgatcgccagcaacggcgaacagctttaaccgcacggcagaccaatcaggggcgatgttcgcccctactccgccgtctgcccggcggcgaggtacttcgccatttccgccggcggcaccatgccgccgccggtcgcccacaccagatgcgtcgcctgcgccaggctttccgcgctcaccccttgcccgctaagctgttgcgcattggcctccatgcgccacggcccggccatgcccgccagggcggagggttccagctggatatgctcgtgcctgtccaacaacccgagcaacgcgaacatctcttcgtcgctcagcgtgtaaaatgcgctcagcaggcgctccatcgcccggccgacaaaacccgaggcgcgccccaccgccagcccgtccgccgccgtgcggttgtcgatgccgagatcttgcaccgcaatgccgtcatgcaacccgctgtagacgccgagcagcatgcagggggaatgggtcggttcggcgaaaatgcagtgaacgtgatcgccgaacgccagcttgaggccaaaggccacaccgcccggcccaccgccgacgccgcacggcagatacacgaacagcggatgctgcgcgtccaccacaatgccctgttcggcaaactgccgcttcaggcggccgcccgccaccgcgtagccgaggaacagggtttgcgagttttcatcgtcgataaagaagcaattcggatcgttcgccgcctgttggcgcccttgctcgaccgccacgccgtaatcgtcagcgtattccaccaccgtcacgccattgtcgcgcagcttctgttttttccactctcgcgcatccgccgacatgtgcacgctgacatcaaatcccaggcgggcgctgatgataccgatggataatcccagattgccggttgatccgacggcgatgcggtactggcggaagaactgacgaaatgcatcggaacacagccgggcgtagtcgtcgccgatctggagcagccccgcctccagcgccagtttctccgcgtgcgtcagcacctcatagatgccgccgcgcgctttgattgaaccggaaatcggcagatggctgtcctttttcaatagcagacgcccgcccaacgcctgcccatagcgccgatccaacgcctgctgcatggcggggatcgccaccagctcggactcgatgatcccctttgtcggctgggtttccgggaaggccgcggcgagataaggcgcgaaacgcgccaggcgctgctcggcttcggccacgtcggcggcggtcagcccgacatggggcaagccggcggccagcgtggtcgcacgcggattgaaccaggtgatcggctcgagggcgagcattcgttgcagcagcggatgctgcgcaacccacggttggatctgtgatttttgcataagagtccctgactgatttggcgttgccgtcaccatgccgtgaacgccggcggctgacaaatgataaattctgagtttgaggtgcaatagattgatgcaaacgcggcgttagcctgccgtcacgccaaacagcatgcccacgcctgaggagaccgccatcgccagcgcgctccagatcaggatacgcgccacgcccggcaagatcggcgccccgccggttttcgcggcgatgccgccgagaacgccgagagaaatcagcgccgacgccaccagcgccgctcgcgtccagtcgagcggtgcccacagcgccaccagcagcggcagcagcgcgccgagggagaaactgagggccgacgccaacgcggcctgcagcggccgggcgcgggtgacggaggaaatgcccagttcgtcgcgcgcgtgcgcctccagcgcatcatgcgccatgagcttttccgccacctgccgagccagcgccggatccagcccgcgatgcacgtagattgacgtcagttcgcgaaactcccccggatagtcttcgagcaactccgcctgctcttccgccagcgcggccttttcggtatccgcctgcgacgagaccgacacatactcaccggtggccatcgacatcgccccggccacccacccggcgacgccggcgatcatcagcgcggaatgcgcggcgctggccgccgccacgcccagcagcaggctggccgtcgaaacgatgccgtcgttggcgccgagcaccgccgcccgcagccagccgatgcgttcaatactgtgccgctctcgatgcatcctttctctccttcgttctcttaccgctagccccgcgccgccgcttccaacccggcgatgtcgattttgcccatcagcagcatcgcttccgtgacccgccgcacgcgggcggcgtcgggatcgttcatcaactccgtcaggcgccgcggcacaatttgccagcacagcccccagcgatcgcgcagccagccgcactgctccgcctcgccgccctcgctcaacgcatcccacagccggtcgacttccgcctgatcgtcacattccaccatcacggagaaactgtgattgaacggatccagcggcccggcttcgatcgccgcgtagcgctggtcccccagcgtgaaagaagccagtttcacgctgccggccgggccgctcggcgtatccgccggcaggtcggaaaaccagttcacggacgaaccggggatcagcgcgacatagcaattcagcgccgcttccatgtccttttcaaaccacagatgttgcgtaattctggccatttgcgcctcctttacgcatcgaggatcggcgcgaacccgccaaagatcatgcgtttgccgtcaaacggcatctcaccgagcgccttcatgcgcggatcgttcatcattttctcgttggcggcgtcgcgcaccgctttggaggggtactctatccagctgaacaccaccacttcaccttcttgcgccttcaccgcgccgcgaaagtcggtgagcttgccgtcgggcacgtcatcgccccaacactccacgatgcgcgtggcgccaaactctttgaacagcggcgccgctgcggccgccaaccggtgataagcctccttgttggcggccggtaccgccaccacaaaaccgtctacgtatttcatcctggtatcctcttgtctgattaaggacagtcggttcagcgcgggcgacgttgcctgcgccccctaccagtttagacggcgggcgcgcaacccggatcggaagttcagcgctcaggatcgttcggtgggtcagagtccggcgtggcgacccggttacggccggcgtttttcgctttgtataccgccagatccgccagtttgagcaagtcggccaggctgtggccggaaccgcccgggcaggtcaccatgccgatgctgacggtgatctgcagcggatggccggccggcatggtgatcgattccgcctcaatgcgttgccgcagccgttcggccaactgcaacccttgctgtggctggccgagcgtcgagacgatagcgaactcttcgccgcccatgcggccgaacagatcatcgacgcgcaaatcggcggcgatcgcacgggtaaaggccatcagcgcctgatcgccgccggcgtggccgaaacgatcattgatcgatttgaagtaatcaatatcaagcatcatgacgcataccaactcgcccttttggtcaatcatccgctcgccgcgctgcataaacgcattgcgcgtcagcacgtgggtcagcgcatcgtggttcgccacatgctccagcgtgcgcagcagcgcgctgcgcgcatagttcatgctggccacggcgatgggccccagcgccagcagcgcgatgcccaaacgcatcgataccgcgttttgcaacacctgcatgtcgagcgtcgtgctaagcaacccgaaatcgatcgccagatggcaccacagcacataaatcagcaccgcaatcatggtgcagaacagcgaaaaggacatcgccagccacagcagcaccggcatgggaaagatcaccgccccggggccgccgatcagcacgctgcagatcgccgccaacgccagcagcgccaataccgccagttttcgtcccgcgcgcggccattggctgcgctgcgtcactatgctgcgggccgcgcgcaagcgatgccgccaatcggcgggaaacgccagaataaacggcatcagcgtgacgtagttggtgaactcggatgagaaccacagtgccagcgaggtcaaatagggcctgccgaacagccactgcgaggccgccgcgcccaccaaaccggtcgcggcggcggcggccaggcagatgccgaacaggtacatgctggaggcgccacgctgcagcatacgcgccggcggcgacagccgcatgtacagcagataccccaccaccacgccggtcagattggcggcgttcagcagcagcgccttttgcagcgaactgccggtcagcaggtccgccgccagataacccagcaccgccatgccccagccggcgcgcgtggcccactgcgggcggcgcaccagaaacgccagcagtacggcgtttaccggccagaatatcgccaaaaatccgacggggcggctcacgatgcccaacaggcaaaccgcgaacaccaacagaaagacggtgagtgcgggccaaattttccgggcatcggacaacgaggtggtttgcatcttggatccagagacttctgctgcgtaaggtgacaatctgttcgtgtcacaaccgtcgacgatgaggagaagataagcggccgactcgcctattattgccagttttgccggcccggacatctgtttattcatctaggaaaaatatatttgtgtatcaatatattgacgacacccgcatacctggcacagaaacggctaaagcggacgcttcactttgaacatttcacgccccagttggcctgttaccggtaaaaaccgccgtctttttcctcaaaagcaaaataagattgggctatgtggggttgttttttcatcccgcgtcaaaacgccttgcgatacatcacaaaaccggggcgctccgccaccttgtcgtacagccgcatggcgatctggttggtttcgtgggtattccaatacacacgcggcaaccccaactgctgcgcacgctcgtaaaccgccgcgatcagcgccctcgccacccctttgccgcgcaccgcctctgcggtgaacagatcctgcagatagcagttgggctgcagctgaatggtgctgcggtgcagaagatagtgcgttaatccaacgacctgcccctgatgctcggcgaccagcgcgtacatcggttcgtaggcgtcgaaaaaacgccgccaggtggtctgtgtcacctcatccggcagcgccgttgccccctcccggccgtaaaaggcgttatacccttgccacagtgccagccaggcggcgtaatcccgttgttccagcgatctgaccacgatgctttcgctcatgatgtcctcttcgatgatgcccaaatgccccgcctccagcatagaacaacgagcgtcaacgcgcaggcggcggcatcacaccggcgagaaaatccagcaacgcgcggttgaacagcgcgggccgctgcagcggcgcgaagtggctgacgcccggcagcgtcgtcaaacgggcgccaggaatgctgcggctcaggtaggcggcatgttcggcgcggataaattcatcgtgttcgctgtgaacgatcgtcaccggcacgcgaatggccgccaattcccgtgcgcggtagtccggctggctgctcatcatcaggcttacggcggagacgaagggagcgaaatcctccggcgtcggtgacaaggcggcatagtcctgcgcatggcgcgcaaaacagcgctcgacgagcggactggacggcggcggtttaaccccgctggcatccatattgcaaccgaagaaaaagacgccgtccacccgctcgggcgcccgatgggcggcgatgagcgcgacgcaagcgccgtcgctccagcccgccagcgcggcgtgggggatttgcagcgccgccatcaccgccaacagatcatcggccatccgatcgtaacgatacggccgggcgtcgcgcgtgctgcgtccgtgcccgcggctatcgatgagcaacaccccgtagccggcggccagcagcgccggcagttgatacccccagttgccgctgtggcccaggccgccgtgcaacaggatcagcgtcggatcagcgccataggccgcataccagatgtgcgcgccgtcgtgttcgacaaagccctgcctggaaccgggcggcaacggcggcgcgccctgcgcggcaaagcgggtcaaatcgtcgtcggtttgcatctttctcccctcattcgccgaggttgagcatcaatacggcatccagggagtatagttcgcagcggcaagcggtgccgttcgctttcccggcatatacttaaaggaggaatcgcaatggaggacggtgagatgaagaagataattctcgtgtttttgacgttgatgctgagcggttgtatcggcggaggcggcggcccatcgaatgcgccttcggcatcgccaaatgaaccttacacctgcaccaaatccagcgccaacagcgactgctcgcaatcggtggaaccatcgatgtactagccgcgctcggcgggccgtcgcttaacggcccgccgcctcaaaccggcactaggaggagtgctcctcttcattggcctgatatcgcgtcgcctgctgcttcataaataccacttcttgcgggctggacaggctcacttcctgcgcgcgcagcagcttgaggatattgaacagcagttcgctcttggtggcgccgaccatgcgcgggctcggcacatagccggtcacgctcaggataatgccgtccggccccagttggctgaagcgcacgtaaggcgccggcgtgtccagaatggtttcgtactcgttataggcgctgagcaagatattgcgcacctgctccggatcgatcgaggtcgggaacgtcaacgcgatggtcaccacgccttgcgcgttgcccatggtggcgttgcgcacgttctgcgagatcagctgcgagttcggtacgatcatggtggaacggtcgctgagctggatttcggtagcgcgcacgttgatgcgccgcacgtcgccttccacgccgccgatgccgatcatatccccgaccttcaccgggcgttcggtcagcaggatcaggccggaaataaagttcttcacaatctcctgcaaaccgaaaccgataccgaccgacagggcgctgacgatccacgccaggttgctccactggatgcccagcgccgccagggtgatcagaatcaccagcacatagccgatattgctgaacagcgtcaccagcgaggcgcgaatgccgacgtccgaaatggtcttcggcagcagctcagagcccagccagcgccgcaccgcgcgcaggatgtagatgccgatcgctaggcagatcacggcgttgagcaggttgccgggcacgatgttgaaacgctgcaagccttcgccggtcaggatcgagacgattttctccatcagcgagcccggcgtggtgctgccgaacgagccgttgaacaacgcgacgatcatcaacagcaacagtgaacatttggccagcgcggtggtgatgatcgccacctgctccagatggcgatccttgaagctgagcgttttcttcagcatcttgccgctgacggtctgcggcgaaaacagcgcggcgcacaggtcggtggcgaacagtaccatgaagtagaacgccatcagcaccagcaccacccagatcagctggtaggtcaggaagcgggcgaaggcgatgtagccgataagcagggaaagcaggatcaccaccgaacacaccagggtgacgatgtgcaccagcccgccgaccagcgtgcgtttttccaggtgcgcgccctgctgctccagacggcgacgaatgcgctggccgcgcagcggcgccgccagcagcaccatgccgatcagccccgccaccaggccgttgccgaagatggtggtagccaatgaggcgctgacgacgttgttgatcagctccacagtaccgaacgccagcgccagaccggccagcagcggcgagaagtaacgcagcccggcggccacttcattgtccagcgaagccaaacgccaggacgggcgattcagcgacagcgccgcacgccccagcccggcgatcagcgcgcagaaaatccccagacggttaaagccttcggcaaagtcttccagcatcaccggcagcggctgcacgcggataaagacgtaatacagcaggttcagcgcgatcgaggtggtgatcaccgtcaccgccacggtgatgatggccataaagctgcggcgcaggcgcccgtccggcaggaagcgaatgctgacccaggcgaggaaacgctcggacaaatagcgcccccaggaccagacgatcaccgccagcgccagcaacgccagcgtgccgtaccgccattcgtcctgccaactggcgtcccaggccgctttcatctcggcgttgaactggtccagccgctgcacgtcatccgctgacggctgcacgaccggcgtccagaatttgacgcccaaaatgctgccggtgttcagcgccagctgggttttgaacgccacccgacgcagatcgctgatctgctggcccagatcgaaggcgctggtcttgatggcctgcgcgcgttttaccgcatcgtccaactgcttcttgctgctgttcagcgcattgcgctgctgggcgacggccggggtttccggcagcgcgccggccgccggggccggccccagcacgtccagctgcgcctgcagtttttcctgcaccggctgcagatcggcggacaatttatccatgctggcgaccagatcgtccgtcgccaaccgcagcttgctgagctgggtgtcggtcgtcgctttggaaaccagctgcttcatgctgtccaactgcttttgcgcggctttcagctgcgtagcgggatcgggcgcgctttcggcggcgggatcatcctgggtggcggcgacggcggcgaacggcgtcagttgcatacccaacagcaataataacaacagcaggaacgggcgaggctttaacataaattcagtgctcagcatcattatctgatagacagacgaacaggcggcggatgaaccgtcgcttaaccataaacgctaattataatagctgcttaatgtcggccgaaatacagtaattattcccattgtgtgccacgcgcccgcgctcgccttagcttgctgataattcaggcgcttttacactggcgatacggcatgaagcgctctataatccagccaccgattaacctgcaaccaataaaaggagacttactatgctgacgtgtgaattggtttttcactcacacttctttggtaatcgtcgccgctcaagcattaccggtatcgcgctgcgataacccagcttgagcgaagcttactaaatccaggatcttccctccggcttaccgggttgtcgtcagcaatgtttgacgataggcattgtcatgcctgtaactcttgagtaagcaatgagcacattactgtctgcacaatctgtcggttacgacaacgcgttcggcgtcctgctgagcgagatttccttcagcctgaaaaaaggcgaccgcatcggtttgatcggcgataacggctgcggcaaaagcaccctgctgcaaattctcagcggctacctgcctgcgcacaccggaacggtgacattgtcacatcaatgtctgatggcgcgcatcgagcagcacctgccgccggaactgcacaccagcaccctgctggatgcggttctggcgcggctgcctgcgggccaacacctcagcgaacgctggcgctgcgaagcgctactggccgagctggggtttgaaccggcgagctggatgctgaccgccggcaccctcagcggcggccagcatacgcggctgctgttggcgcgcgcgctgatccgccagcccgatctgctgctgctcgacgaacccagcaaccacctggatctgcccacgctgctgtggctggaacagttcttgcgtaactggaccggcagcttcgtgctggtgtcgcacgatcgctacctgctcgaccaggtaaccaactgcacctggatcctgcgcgacaaaacgctgcagttcttccgtttgccctgctctgcggcgcgcaccgcgctggcggaacaggacgccgcagacgaacagcggcgacaggccgagcaaaaggaaatcgaccgggtggaaaaaagcgccaagcgcctggcgacctggggcaaggtctacgacaacgaagatctggcgcgcaaggccaagcaaatggagaagcgcgtcgatcggttgaaggaagaacagaccaccctgaccgccggcagcccgtggcggctgcggctgcagggagaagcgctggacgccgatcgcctgctggcgctgccgcactgggcggtgcgcccggcgccggatgcgccggtgctgttcagcctggaacatctgcgcgtgaaaagcggcgatcgcatcgccatcgtcgggcgcaacggctgcggcaaatcgtcgctgctgcgcctgctgtggcgcgagtatcagcaacaaacgcagcgcccggcgctgttccatccacgcgtgcgcatcggctattacgatcagagcctgcaacagctacgcgatgaagacacgttgagcgaagcgctggcgcagtttgcgccgctgactgaggaacagcggaaaatggcgctgatcggcgccgggttcccttacctgcgccaccatcagcagatccgttcgctgagcggcggcgagcgttcacggttgttgttcgtcggcctgacgctggccaaccattcgctgctgttactggatgagcccaccaaccatctggatatggcgggtaaagaggagctggcggaaacgctgcgccaattccccggcgccgtcatgctggtcacccacgatcggatgctgatcgaacagagctgcaaccgcttttggctgatagaccagcaaaaactggaggagtggcacgatctcgcgccggtgtaccagcgcctggcgggtgaaacgccggctctgccgacggcgcacgaggccaacgcagacgccccgacgccaaacccgctgttggaaggcgaagaggcgttgctgaccgccctgtttgccctcgaaagcaaactggaggccgacctggcgcgtaaaccgaagcatcaaaaaccggagcttcaggcgcgttggcgccgcgagattgccgacctcaccgcccggttgcatctgggctaatcccacaggccgcccggcggcctgtcaggctattgacaaagaggggaaaaagcgtggtttttcccctctttgtggtgatcggccgaaaatcaataaattgattttccttgttttttattcggtgatctctgccaacccggcaagggtataaggtttgtcatcaatctcacaggccgcccggcggcctgttttttcctctttgtaaaaaccgcgtgccgccgacggtttgagacgcgacacgctgcgcttttcttatccgcagcgctgagcgacacattactttcatcattctctggcaggctactgccattcttttttttcgttatcaggcactccatgacgtcactctcaccacgggacatcgaggcgcgctaccgcttcgcgcgtgagatcgcccgcgccgccgccgatctcgccttcagcttttatcaacgccggcaaagtctggccgtcgagtttaaacaggggctgcaggacgtggtcagcgaggccgaccgccgagtcgaggcgctgatccgccgtatgatcaaccgtcggtttccccaggacgggtttctcggcgaagagagcggcagcagcggcgataatgttgcctgtatttgggtggtcgatccgattgacggcaccgcctgcttcctgaacgggctgcatacctggtgtatcgcgataggcgttgtgatcgacggtgagccagcgatcggcgtggtctacgatcccaaccaccgcgagatgtttcgcgcctgccgcggccaaggcgctttcctcaacggggaaccgatcggcgtgcatgccgggcacagcgtcgcggatggcgtgatgggcgtcgggatatcgccgcgcgcctcggcggcggaattcagcggttttctctgtcgcctgctgcaggcgggcggcatgtttgtgcgcagcggatccggcgcgttgatgaccgcacaggtggccgccggccggctgctgggctattacgaaccgcatatgaacgcctgggacagcctgcctgggctggtgctgacgcgcgaagccggcggcgtggcgaatgactttatgcaccacaacgggctgcgacgcggcaacccgctgctactggccaacgcggcgctctatccgcaattggccgagctgattcaaacgccgggcttgatcggctcgacgtgccctatcgcgcgtgagatggccggataaagcgcgcgcagccgccgctcgacccgatcgaccgcatcgtgcgcggcggcgatggttaccgccggcgacacccggcagtggaagttgacgatgatgccgccgtcggttctgcgcgcccggatgttgtgcacgtcttgcaccttatccccctgctccagcgccgactgcaaaatcagccgaatatcggccagctcggcggcggaaacatcctcgctggccagccagtgcggcgtctgcggctccagatgggtccctatctcggtgtcctcgccgatcgcctgacgcaggatcccttctatctccgtggcgatatcatgcgcctgcgccacgctggcgttggccggcaccgccaaatccatgccgatcgccatgtgcgtcggcaactgctgcaaggtgacattctgcacctgcgcgccgtgattggcggcgatcgcccgaatgcgcgtcgccatgtcttcgtcgctgcgggtctgcggcaccgcgatgacggtaaactccgccttggcatactgctgccgcagtcgttcgacgatttctcgcttgagcgcatcgatgcgctccagcggcaaggtgcggcacaccgccaccgtgatctcgacaaacagtacggcgccggcgttgcgaatacgcacgctgtcgcaggccagcaccgccgggaagctgtccagcgtggcgcgaatcgcctcggtggctccggccggcgcggcatccatcagcgaatcgaaggaacgtttacccagtttgattgccgcgacaaagataaaaccggcgacgatcagcgcggcgatggcgtccgcacggccaaagcccagcagcacaaacaccatgcccagcagcaccacgccggacgaaagcatgtcggagaagaaatgcagcgcatccgcttccagcgccgcgctgtcggtcgccctggcgacgcggttgagcgcccgcacgcggaaaaaatcgacgcagatggaaatcagcagcaccgcgatcaccaccggcgccgcgacgatctcatgcggctgcccaagcaggctgctgcccgcctcgtagacgatccaaccggcggcaccgagcaacagcaacacctcgaacagtgccgccaggttttccaccttgccgtggccgaagtggtgatcgtcatcggcgggtttatcgctgatgcgcaccgccagccaggtgatgctggtggcgataaaatcggtgaaagagtggatcccttcggatatcaggccaatactgccggtaaaaatgccggcgacgaatttgcccgtggccagcaacccgctggcgatcatcgagtttctggccacggcctgtttttcattttgcatgatgctgctcacattcggacggtgatttatttttttactttagaggataattgccagacaaaggcgatcagcagcatactgccagagaaagtcagcatgaggctagtaagaaaattggattttccggtggaataaaaataaatctcattcacccccaccgaaatcattaaaatggcgtagagcaatcccagaataagaatcgtcattattatcaactcccgttttaggctgcgcgttcagcgcgccgctaaatcctccccataataaatagcgatcacggggaggatgcatctaggcggatctttagcgttcatcaatcatcccatttggtgctcatataggccgccaacaggcccagagagctgatcattgccaggaatcccataaaaatagtcatgtttcccattattttgtcctcaggttaaatgttatcgataaaatccccttgcgttaaatatcggggttggtcggcatccatggtttttaacgtcctcctcaggcttgtcacatttccgccctttacgggcggagcggtttaaatacccaaaacgtgctgggcgattttgaaataaataatcaggccggtgccatcgataaaggtggcgataaacggcgccgacaccacggcaggatcgatgccgagacgtttcagcagcatcgggatgatcgaagaaacaatggcgctccacacggtgatcgccaccagcgacaggctgaccaccagcgtcacctccatgccgacgcccatgatccaggcgcgcacccaggccgccagaccaatggtgacggcgatcagcagcgaggtcgtgacctccttgcggatcaccgcgcccaggttgcgcaggctgacctctcccagcgccatggcgcgcaccagcgtcgaggtgatctgggtgccgctgttgccgccggtgccgatcagcaacgggatgaagaacgccagcgcaatcgccgcttcgagctgatcttcaaacgctttcagcacgttgccggtgtaggcttcagcgacgaacaacatcagcagccacaccgagcgtttgcgccacagcgcccacgggctggtctccagataaggcttgtccagcggcaggctcgcgccctggcgttgtgcatcctcggtgttttcatcctcgaccagccgggcgatctcacgctcgcccagtacgccgaccagcgtgttattggccaccaccggcaccacgtccaaaccgcctttgcccagcagatgcgccacgtcgttacggtcatcgtcgggtgaaacctggaaatagctgtaatccatcattacaccgacggctttatcctgttcttcgcactgcaacagttttttcaccgacagtgtgccgcgcagatgataatcgtccgcggtaataaatacccggctgggaatttcgtccgttttgagctgcgaaagtaaatattcccgggcatgattgaccgtcatcgttgcgggaacggtaataaaatcggcgttcatataaccggcgaccgaagtctcgtcgagagtttcagtcgcgttcagcgccggagaagaatagtgttgatgtgacttgatcattttgtcagtccctatttctgttgtgaacttcaacagcgaatcgcataggggcgtaaccacagagggagtgcagactgcctatctccgcgtccaggttttagcactatacaacgtatccgagttgttgctcggaagttactttgggctgaaccttaatccgataaagcctgtcttaaccttgggcatctctcgatgtcgtcagatcagtaacctgtgtttgtataggagcctcgccaaacgagatactgcatataaactaccggcgcagtataggcgttgttttatccggcgggaagaaaagattgcccgtcgtttatggagtatttaggataatgttaattaaacggccatttataaaaacggctgatataaatcagccgttttttatttttcagtgttcgagaatgtagacgtttttatcgtataaggcgccctgacgagtaaagtcgatccccttcacgtaaggtttgatgagcgtggcgttggcttcgtagtacaccggcgcgaccggcgtatcgacggccagcaccgcctcggcctgctggaaatactgctgcacctgctgcggtgtcggcgccgccgtcgcctgatgcagaatgcgatcgtactccggattgcggtatttggggctgttctcgctgctgtcggaacggaacacgttcaggaaagtagacggatcgttgtaatccgccagccagcgggtaaaggccacgccgtactgcccgcggttgatattgtccagcgtgactttgcgctcctggctttgcaaggtggcctctgcgccgaggttctttttccacatggcggcggcggcgatgacgatcttcttaatggtggcgtcattgctgtacagcacggtaaagcgcagcggatgctcggcgttgaaaccggcctgcgccagcagttgcttcgcctgggcgtggcgttgttccggcgtcaaaccggccgcggcgccgggctgcaggctatagccgcccgccccggttggggtaaaggtccaggccggctgctggccgtatcccaacactttgccggcgataatctctttgtccagcgccaggttcagcgcctggcgcacccgcacgtcgttaaacggcgcctggcggttgttgaaggcgaaatagctggtggagagcagcggataggtcaccagctgttgctcgccgagcgtttttttcagctgctgatacagctccggcggcgtggtataccccagctcaacctcaccggcgcgaaaacgcgccacttcagggaagccctggatcggcaagaaggtgaccttgttgagcacggtattggcgttatcccaatactgcgggttacgttccaccaccaccttttcgttcaccacccactggctgaggcggaacgccccgttgccgacaaagtgcgccggctgcgtccagtttttgccgtactgctccaccaccttgcggttaaccggcaaaaccgggaaatgcaccagttgcttgagcagataggaattaggctccgacagcgtcacctgcagagtgtgcgcatccagcgccttgacgcccagctcgctcggcgatttgctgccggcgttgatcgccgccgcattcagcacgtaggccgaagccagatagctgccgtacggcgaggcggttttcggatcggtgaggcgccgccagctgtatacaaaatcgtcggcggtcaccggatcgccgttcgaccatttggcctgcggccgcagatggaaagtccagacgttgccctgatgctcccacgtctgcgccagtgccgggatcacttcaccgtcttttccgacgcgcagcaagccttcgaacagatcgttgaagatgtagaactccacattgctttcggccaggtttggatccagcgtcgccggttcatacccgttggcgcgcaccagttcttgcaccgccgccagtttaacgcctgccggcacctcagcggcttgggcagccgtagcgttaaaagccaggaggattaaaccagccagtttcttgccattaaatgaatatttcacgtcgatatccctgattagtgttttatcgcgtttaatatgcaatgaggtagtggaataaattaaatcattaatcgctatgagtcataaccaaaagcggtgttgaatttctttcattatcaaagaagtactggcgacagaacgatgaaaaacacgaggataaacgcggagaccggcattgccgtcaggaacgccgtgaaccggcggtgacataaattcaggcaatcaatacagattattccagccgaagcttaacttatccttagggcaattcattttgtgagcgatcgtcaaaaataatttaatacgaatcgttttcactatcattattgatgttcttggctaaaatcggcctgcttgcgctcgccaggcgatattcgttttcttcattcgaacgctaaaaaggataactgcatgaagctgcgtatttcatctctcggccccgtcgccctgctcgcctcctcgatgatgctggcctttggcgctcaggcggcctccgccgaccagggcatcgttatttataacgcccagcatgaaaatctggtgaaatcctgggtcgacggatttaccaaagacaccggcatcaaggtgacgctgcgcaacggcggcgacagcgaactgggcaaccaactggtacaggaaggcagcgcttcacctgccgacgtgtttctgacggaaaactccccggcgatggtgttggtggataacgccaagctgttcgccccgctggacgccgccacgctggcccaggtggaaccacaatatcgcccaagccacggccgctggatcggcatcgccgcccgctctaccgtgtttgtttataacccggccaaactgagcgacgcgcagctgccgaagtcactgctggatctggccaagccggaatggaaaggccgctgggccgcttcgccgtcgggcgccgatttccaggcgatcgtcagcgcgctgctggagctgaaaggcgagaaagccacgctggactggctgaaagcgatgaaaaccaactttaccgcctataaaggcaacagcacggtgatgaaagcggtcaatgccggccagatcgacagcggcgtgatctatcactactacccgttcgtggacggcgcgaaaaccggcgagaacagcaacaacatcaagctgtattacttcaaacatcaggatccgggcgccttcgtcagcatctccggcggcggcgtgctggcttccagcaagcatcagcagcaggcgcaggcgttcatcaagtggatcaccggcaaacagggccaggagatcctgcgcaccaacaacgccttcgaatacgccgtcggcgtcggtgcggcttccaacccgaaactggtgccgctgaaagatctggacgcgccgaaggtagacgccgcgcagttgaacagtaagaaagttgtcgaactgatgaccgaggcgggcctgctgtaaggcccgccggcaaaccgagagtttttgatcgttatgtcaaacctgagtacccacgccgcgcagaccgcgcggcgttattctgttgtcccccgtcacccgcggccaggggcgatcgtggtggtcagcgccgtgttgctgtcgttgctggcgctgctgccgttgggattcgttatcggcgtggcggttgaaaccggctggcaaacggtcaaagcactggttttccgcccgcgcgtggcggagctgctgttgaataccctgctgttggtggtgctgacgctgccgatctgcgccgtgctgggcgtggccctggcctggttgaccgaacgcaccacgctgccgggccgccgtctctgggcggtattggcgaccgcgccgctggcggtgccggccttcgtgcaaagctatgcctggatcagcctggtgccgtcgatgcacggcctgggcgctggcgttttcatctcggtgctcgcttactttccgtttatctacctgcctgccgccgccgtgctgcgccgcctggatcccggtatcgaggacgtcgccacctcactcggctcccggccgccggcggtgtttttccgcgtggtgctgccgcagctgaaactggcggtctggggcggctcgctgctgatcgcgttgcacttgctggcggagtatggcctgtacgccatgatccgtttcgataccttcaccaccgccatcttcgatcagttccaatcgaccttcaacggcccggcggccaacatgctggccggcgtgttggtgctgtgctgcctggggctgctgttgcttgaggcgataagccgtggccgcgcacgctatgcccgcgtcggttccggcagcgcccgcagccaaacgccgcgccgcctttcgccgccgctcgccgcgctggcgctgctgctgccgatcgcgctgactgcgctggcgttgggcgtgcctttcattaccctggcccgctggctgtggctgggcggcctcgacgtatggcgcaacgccgatctgtggcccgcgctgtggcaaacgctgtcgctgtccgccgccggcgcgctgctgatcaccctgtgcgccattccgatggcctggctgtcggtacgctatccggcccggctgtatcgggtgctggaaggctgcaactacgtgaccagctcgctgcccggcatcgtggtggcgctggcgctggtgaccatcaccattcacagcttccggccgatttaccagaccgaaatcaccctgctgctggcgtatctgctgatgtttatgccgcgggcgctgatcaatctgcgcgccggtatcgcacaggcgccggtggaattggaaaacgtggcgcgcagcctgggcaaatcgccggcgcaggcgttgtggagcaccacgctgcggctggcggcgccgggcgccgctgcgggcgcggcgctggtattcctggcgatcgccaatgaactgaccgccacgctgctgctggcgccgaacggcacccgcacgctggccaccggcttctgggcgctgaccagcgagatagactacgtcgccgcagcgccttatgcgctgattatggtggcgctgtcattgccgctcacctggcttctttattctcaatctaaacgcacggcgggactatgagcacgctcgaactgcacggtatcggaaaatcttacaacgccatcagagtgctggaacacattgacctgcaggttaccgccggcagccgcacggcgatcgtcggcccttccggctccggcaaaaccactctgctgcgcatcatcgccggctttgaaatccccgacggcggccagatcctgctgcaggggcaagccatgggcaacggcggcggatgggtgcctgcgcatctgcgcggcatcggcttcgttccgcaggatggcgcgctgttcccgcactttaccgtcgccggcaacatcggttttggcctcaagggcagcaaacgcgagaaacagcatcgcatcgaggcgttaatggagatggtggcgctggatcgccgtctggcggccctgtggccgcatgaactgtccggcgggcagcagcagcgggtcgcgctggcgcgtgctctgtcgcagcaaccccggctgatgctgctggacgagccgttctcggcgctggataccggcctgcgcgccgccacccgaaaagcggtggccgaactgctgacggaggccaaagtagcgtcgatcctggtcacccacgatcagagcgaggcgctgtcgttcgccgatcaggtggcggtgatgcgcaatggccggctggcgcaggtgggcgcgccgcaggatctttatctgcgcccggtcgatgaaccgaccgccagcttccttggcgaaacgctggtgttggccgccgaactggcgcacggctgggccgactgcgcactggggcgcatcgccgtcgacgatcgccaacgcagcggcccggcgcgcatcatgctgcgcccggagcagattcaaatcggcttgtccgatccggcgcagcgcggccaggcggtgatcaccggcatcgatttcgccggcttcgtctctacgctcaacctgcggatggtcgccggcggcgcgcaaatcgagatcaaaaccgtcagccgcgaaggcctgcagcccggtgctcaggtcactctcaacgtgatgggccaggcgcatattttcgccggctgactcacttaaggccgggctgctccccggccttctcagcggcaaatcttgtcgcggcgcggctttttcggcgccagcagataatccaccacgctttcgtcaacgcagctgtcgatgccgttcagcgccagcgtatgcccgtcgcgttcgcgggtgatcagcgggcttttaaaggcggcggccatcacttgcgcgttgcggtacggggtggtcggatcgtagcgctgggcgacgaacagcagcggcggcagcgcggcggacgcagctggggtatgtggccgatctttgccgcggtacggccacagatcgcacatttccagcgggtattcgtgcagcggcagatagtgggcatacaaagcggcggtattgatctcctgccgctgccggcgcaactgctgcggatcggccgtcgggttggcgacgtcggcgcaggtgatgacgttcagggcgtcatcggcatccggcgaatagctttcgtcgatcagatcggaaacctgctgcccggcgatgccggcatcgagctggcgcagcacggtggccagctcatgccagcgctccggccacagcagcagcgaacgcgtgaccgtcaacacgtcgtcggcggagatttcatagcctgccgcagtgacgaacggctgctcgtgcagcttgcgcagcaaggcgtgatagcgctgcagcgcctgattggcgccgccgcccagctgacagctgtcggttttaccgcagtaggcggcgaagcgcaggaagctttgctggaaaccccgttcctggttcagccgctgggtgaaatcgtcctcggccagatccaccaccccgtcgagcaccagcgcgcgcgttttcttcggaaaacgctcggcatacagcgccgccaccttggtgccgtaagagtacgccaccgccgtcagccctggctcgcccagcgcgtggcggatcgcattcagatcgttgaccgcttcgtcggtgccgatatgttgcagcacgtccgcgccggtctgtttgatgcaggcggcaatcagggcgcgcgtctggttctccgcgccggccacgtcgttgtcgtccggttcagggcgttcgtcaccttcggccagctggcaggagattttcggcgtcgattggccgacgccgcgcggatcgtaaccgatgatgtcgtaggatttacgcagcctggcgacgtgggcgtcgttgcctaaataggggttgatgcccggcaggcccggcccgccgctgattgtcaccacgctgccctttttcggcccggtggcgggcagcagggtcagcgccaggcgcacggtctgttcgcccgcctgcgccgcatgagcgggcggcgtggcgtacgccagcggcacctcgagatagccgcagcgcagtcccggcggcggcgcctcatcgaaccagcgctgaaagccgctgttgagacaagattgccaacgaatgccgtttccggccgccgccccgtggagcgcaggcttagcctgagcgggcaacgcggcggcagtcgcggcgagcagcgccagaatacgcagtactgacatggggagtcctttcaactcaacgaatcggtcaaaggttaacggtacccggttaaaccgctagccaatagaacacaaaaagccgcgcgggtgaagccgccaccgcacgcccggcaagacttttctctgctcggattgctcttataacgcacagaatgctgcaaaaaacgtcgtttgcctgctaggcttagggttcattatcccacaaggaacaggagagcagcatgtttggaaaagcggaagacaaagccaatgaagccgcaggcgcggtagaagaagcgttcggcaaagccgttgattcgccggagcatcaggtgcgcggcgcggcgcgcaaatacgcctcccaggccagctatgccgcccgagacgccgcggacagcgtaagaacgcaggtggaagccaacccgctggccggcgtggccgttgcggcggcggtcggcatcgttttcggcttcctgctgggacgcaaataagcggcgaacgcgccgctcgacaacaggcccgttacgggcctttttttcgcctgcgtgcaaactttcatctatcacagccatcgcttaaaaaaaccaacgccttcaactacgattagtttgtgaccagagcgaggctctgcgatccgacggataaccctatgaggattatcaccattatccatgctgtttaagccgctctccttcacgcggctaagaaaggttgattatggctcgcaccacccctatcgaacgttaccgcaatatcggcatctccgcgcatatcgatgccggcaagaccaccaccaccgagcggattctgttttacaccggggtcagccacaagctgggtgaagtgcatgacggcgcggcgaccatggactggatggcgcaggaacaggagcgcggcatcaccatcacctcggcggccaccacctgcttctggaacggcatgcagcataactatccgcagcaccgcatcaatatcatcgatacccccgggcacgtcgatttcaccattgaagtggaacgctcgatgcgcgtgctggacggcgccgtgatggtctatgactcggtgggcggcgtgcagccgcagtcggaaaccgtctggcgccaggccaacaagtacaaggtgccgcggctggcgttcgtcaacaagatggaccgcatcggcgcggattttttccgcgtgcgcaaaatgatgatcgagcgcctgaaagccaacccggtgccgatcgttatccctatcggcgccgaagatcacttcagcggcgtggtggatctggtgcggatgaaggccattctgtgggacgaggcctcgcagggcatgaacttcagcttcgaagagatcccggcagagctgcgcgattcggcgcaggagtggcgtgaaaacatgattgaggccgccgccgaagcctcggaagaactgatggagaaatacctcaaccaggtgcccctgagcgaagaggagatcgtccacgggctgcgggtgcgcaccgtcgccggtgaaatccagccgatgctgtgcggctcggcgttccgcaacaaaggggtgcagcgcatgctggacgcggtgatcgagctgatgccctcgccgctcgatgtgccgccgatggaaggccacggcgaacacgatgaaatcatcacccgcaaagccgatgacaacgaaaagttctcggcgctggcgttcaagctgatgaccgatccgttcgtcggccagctgaccttcgtgcgcgtctactccggggtactggccaaaggcagcagcgtttacaacccgatcaaaggcaaaaaggagcgcatcggccggatcgtgcaaatgcatgccaacgatcgtaaggacatcgacgagctgcacgccggcgacatcgccgcctgcgttggcctgaaggacgtcaccaccggcgatacgctgtgcgatcccggcgccatcatcacgctggagcgcatgaccttccccgagccggtgatcgcccaggcgatcgagccgaaaaccaagggcgaccaggagaaaatgggcatcgcgctgcagcgcctctcttcggaagatccgtcgttccgggtgcgcaccgatgaagaatccggccagaccattatctacggcatgggcgagctgcacctggagattatcgtcgatcgcatgcgccgcgaattcggggtggagaccaccaccggcaagccgcaggtgtcgtaccgcgaaaccatccgcaaacgggtggccgacgtggaaggcaagttcgtgcgccagtccggcggtaaagggcaatatggccacgtggtgctgaccgtcgagccgaacgaacccggcaaaggcttcgagttcttcgatgaaatcaagggcggcgtcattcccggcgagtttatcccggcggtgaaaaaaggcgtgctcgaggcgctgaacaacggcgtgctggccggttatcaggtagtggacgtcaaggtgcacctgaccttcggttcttaccatgacgtcgactcgtcggaacaggcgttccgcatggcggcgatcttcggcttcaaggaagcctgtcgtctggcggatccggtgatcctggagcccatcatgtcggtggaggtagaaacgccggaggattacgccggcaacgtgatgggcgatctctcctcacgccgcggtctggtgcagggcatggaagagatcccgggtggcggcggcaaggaaatacgcgccaaggtgccgctgtccgagatgttcggctactcgaccaccctgcgttcgatgtcgcaaggccgcgccacctacaccatggaattcagccactacgccgaagcgccgcgcaacgtggccgaagagatcattcaccacagcaagcgttaacccccgcgcccgccgctgcggcgggcgtcacctcggcttgtcctccaacgccaccaccaccggctgcggcttgatgcgcatggcgtacaccacgccggccatcaggcagacgatgccggccagcgtcagcaacggcggccaggcctggcgcagcagaaaggtatacgccaaccccgccagaatttcgaacacgatgagcggccccaccaacaccgtcggcagccgctggctggcttcgttccagcacagcgcccccagccaggaacagaacacgccgatgatcagcatcagcggaataaacacctcagggcgcgggccgaacggcaaggtgaacgccggctcgctcagcgccagctggccgcagaccgccagatagcccagcagcgccagcggcagcgtcaccagcccttgggccgtggcccaggtggccggacgctgcgtcggattctcccgcagccagcgtgaattgcgcagcgggaaccaggtccagcacgccaccgccaacacggccagcccaagaccgctgagatagcgccagccgtcgatcgataccgcattgccgcgtagctcggcgacgttcacgcacgccaatccacagacgatcagcagcagcgccggcgccagcttgccccaggccaggcgcccgtcgtgccggccgtaaaacaggttggcgcagatggcgatcaccaccggcaaggtgccgatgatcatggtcgacaccggcgcgtcggtgcgctgaatggcgctggccaaacacaggtagtacagcagattgccgatggccgtcagcttgagcgcctccagccaatcctggcgccgcagcttgcgcaggcggcggcgatcgaaccacgccagcggcaaggtgatcagcccaaaggccagatagcgcccggtggactgcagcgcggcgggatagtccggcaccagcagcgggccgacgaaaatcagtccccacatcagcccggcggccagggcaaacacaacgccaatgaacataacgactccgacaaacggccggcgcggccaacccgcccgacaagacagcggcagagtagcgaaaacgcggggaggaattattgtagcaggttgctgttttagcccaatttcacctgtttctggaaacgcaccggcgtgacgccgtaacgattagcgaacgcgcgcgtcaggtgcgcctgatcggtcagccccgccgccgccgccacctgtgcggcgggtatgccgcgctccagcatgcgtttagcctgcgacagccggatcgccatcagcatctgctgcggcgagacgtgatattcggccttgaacttgcgctggaaatggtacgggctgagcgagaccagatcggccagttggtggagggttacggcctcggcataattatcgtgcaggtaacttttcaccacctcgaaacggtgcgccgcctcggctttctctcgctgcccggtgcggatatgcgggtgcagcaactcgacggcctccagcagcaggccgtcgagcgtaagcggatcctcggtttgccacagcatggcgagaatggcggacaggcgctgcgccgcccgcggatcgtggcgcaccgcatcagtaaaccactggctccgatcgccggacagctgctccagcgcctcgggcgccagatagagcatgcggtaacaccaaccgcccggcgtttcggcttcgccggtgtgcagctcgtccgggttcatcagtaccagcgcgcccggcgccgccaaatgctgcgccccgcgatagcgaaaacgctccgccccggtatccacggtgccgatggcgaaggcgtcatgggtatgcggctcgaaggcatagcgctcaatgtgcgcctgatagagttcgacgccgggcagatgcgacaaatgccggaactgcgcgcaatccttctcgaacggaaactgttgtggaaccccttgcacccgacctcctcatccgtgctgacaatctgctcagcatagccaaaacatcgccgattgagtagccgccctggtcctttcgtgcccatcgcctggacgatcgccgccattcggcgtagggttaaggtccctgtccctttcagacgggccgcatcgcgaagctcatcggcccctgacactccgcaaacaagaggcaacaatgtatccggatactcaactgtatatcgatggacaatggcgcaacgcgctggccgggaaaaccctgcctgtcaccaaccccgccagcgacgaggtcatcggtcaggtggcgcacgccgccacagaggatctcgatctggcgctggccgccaccgagcgcggatttaacctctggcgcaacaccgccgcacaccagcgcgccaacctgatgcgcaaagccgctgcgctgctgcgcgaacgcgccgacgccatcgccgccatcatgacgcaggaacagggcaaaccggtggcgcaggccaagattgaaattctcaacgccgccgacgttatcgactggttcgccggcgaagccacccgcacctacgggcagatcattccgtcccgcgcccgcgacgtgcagcagcaaaccctgaaactgccggtcggcccggtggccgccttcacgccgtggaacttcccgattaaccagatcgtgcgcaagctgtccgccgcgctggcggcaggttgttccatcatcgtcaaaggtccggaagaaaccccggcctcaccggcagagctgatcaaagccttcgccgacgccggtatcccagccggggtgatcgcactggtgtacggcaccccggcggaaatctcggaatacctgatcccgcatccgaccattcgcaagatctccttcaccggctccacccgcgtgggcaaacatctggcggcgctggccggccagcatatgaaaaaggccaccatggagctgggcggccacgcgccggtgctgatctttgacgacgccgatctcgacgtggcggccaaagagctggcgcagtcgaagttccgcaacgccggccaggtctgtatcgccccgacccgcttcctgatccagcaaggcgtttacgaggccttcgtggagaaattcaccgccgcggtgcgtgaactcaagctcggcaacgggctggaagacggcgtgacgatgggcccgatggtgctgggccgcagcgtcgacaatatcgaagcgctggtgcaggacgccatcgcccacggggcgaaggcctgcaccggcggcaaacgcgtggcgggcaaaggcaacttcttcgagccgacggtgctgcgcgacgtgccgctgagcgcgcgcgccatgtcggaagagccgtttggcccggtcgccctgctgcgcacgttcgccacctacgacgaggcgatcgccgaagccaaccgcctgccgtacgggctggccgcctacgcctacagccgcaacctcgccaccgtcaatgcgctggggcgcgacgtggagagcggcatgctgagcatcaaccacatcggttttggcctgccggaaacgccatttggcggcgtgaaagactccggtcacggcaccgaaggcggcagcgaagcgatcgaatcctacctggaaacccgcttcgtcaccgtcgccggccgttaatcacgtgtctgatgaatagccaaacgccccgcaatgcggggcttttttttactcgccggccagctcgaacagccgtcgcgccgccggggtcagccccagcatgtgaatacaggcatgcaccacgcccggcaaccgttcgcagcgtaccgccacgcccgcctcgcgcagccgctgcgcatactcctcggcctcatcgcgcagcggatcatattcgcagctcagaatggtggccggcggtaacccgcgcagcgtggcggcgtgcagcggttcgccgtagggttcgcgccgctgagccagatactgctgccaacaaaataccatcgcgtcgcgcgtcagaaagtgcccctcggcaaactcgcgatagctcctcgtcgccatttcgcggctgagcgccgggtacagcagcagctggcgctcgatatgcgggccgccgcgatcccgcgccagcagcgcgaccgccgccgccagattgcccccggcgctgtcgccccccaccgccagacggtcagcgtcaatccctaactgcggcgcctgttgcgcagcccaacagagcgcctgatagacatcttccagcggctgcggaaacggatactctggtgccagacgatagtcgaccgacaggatcacccggccggtggcgttagccagcgcctggcagggctggtcatacagcgccagcgaaccgaggcaccagccgcctccgtgggcgaacagcatcgccggttgtgcggcagcgcgcctttcccccgccggtagatagacgcgcagcgcaatccggtgcccatcggtggcgaccaccgtatagtccctgacgccgccgctcggtgccgcttcgccctgcagcaagcgcaaaccggtttccgtggccgcgcgcatttccgccagcgacgcgggtggcggcacatcggccgatgccgtcaaaaaggcggcgatgcgttcatcaagcggcatgctgttctcccgcaaggaacggcgtaatcagtgcgataaacgcctcatgacactcctcggtgatgaaatggccgcagccggcgaccgtttcgccccgcagatcgcgcgcattgccctgcagcgtcgtcagcggcgcgtcgccggtggcgtgttccgcccccacggtcagcaccggcatcgtcaatggcgtggcggcgcgcactcggttctggcgaacggtctccgggatcgcccggtaatagtcgaatccggcgcgcaagccgcccggcgccgaataggcggtgatatagacctcagccgccacccggtcgcgccgataggaccagcggttgaagatatagccaagatactcccgctcgcgcccctgggtcagggtctccggcaaatccgccaactggttgaacatgaaatgccacaggaagatgttctcctccggcgcgacgaaaatcggcggcggcggcgccagaccggggatcaccgcctccgtcagcaccaggcgctccaccgcctgcgggaaatcgctcgccatggcgtaaccgacccacatgccgatgtcgtggccgaccagttggtaacgttcgtggcccagttgcgccatcatcgcgtgcaacgccgcaccgatgctgccggtgtcgtaaccgccgacgggcttgtcagagtcgccgatgcccggcggatcgacggcgatcgcctgaaaaccggccgccgccagggcgcgcatcacatggcgccaggtgtaccaggtttgcggccagccggggatcagcaacaccggccgcccttcaccggctatcacgcagtggatacgttggccattgacctgggtatagacgtgttccgccccgagatcctgcaacaggatctcgttctcttgttgtttcatggggtgactccctgtgatggactggctcagcgaatgccgagcaaggcattgatctgctgtgggttaaccggtgcgccggcgaaatcgtcgaacactttatcggtgacacggatgatgcgatcgcgaatgaaggccgcgccctcgcgcgcgccgtcctgcggatttttcaggcagcattcccactccagcgtcgcccagcccgaatagccgtactgcgtcaaacgggaaaaaatgccgttgaaatcgacctgaccgtcgcccagcgagcggaagcggccggcgcgatcgatccatgactgataaccgccgtaaatgccctgccgcccggtcggattgaactcggcgtccttaacgtggaacatgccgataacctctttatagatatcgataaactccagatagttgagctgctgcagcaccatatggctcggatcgaacagcacccggcaacgcggatgatggccaacgcgctcaaggaacatctcgtaggtcacgccgtcatgcagatcttcactcgggtgaatttcgtagcacaggttgatgccctgctcgtcgcaggcgttgagcaccggcagccagcgtttggccagctcgttgaacgcagtgtcgatcaatccttccggccgctgcgggaacgggaacagatagggccaggccagtgaaccggaaaaggtgcccagctcgctgagcccgagccgcgccgaggcttttaccgccagcagcatttgctgccgcgcccactcgccgcgcgctttggcatcgccgtgcagcgccggcggcgcgaagctgtcgcacagcgcatcgtaagccgggtgcaccgccatcagttggccgaaaatatggctggtcagttcgctgaccaccaacccatgctccgccaacataccggtcagatcgtcgcagtaggtttggctttgcgcagcggtggccacgtcgaataaacgccgatcccaggccgggatctgcaacgcgctaaaaccggtctgcgccgcccactcggcaatggcgggcaggctgttgaacggcgctgtctcatcgctgaactgcgcgagatgcaggcttggacctttgagggttttcatcgtaaactcctattggttgtcgattgacaaacaatagaagcaaagcgcggcgaccgcaagcgaaatttataaaggcattggtattcccgccgatttaagcgatcctatgtcgctgaatggcaggtaaattggagcagcgaatggcaggcagaccgcgcgagttcgatcgcgaacaggcgcttttaaaggcgcgaaacttattctggcggcagggttacgaaggcacctcgatgtcggatctggtggcggaattgggtattgcttccgcgcgcatctacaaagcgttcggctccaaagagcagctgttccgcaaggcgatcgccagttacgaaaccaaggaaggcggctttgccgatcgcgccttcgcgcaggaaagcggcattcgcccggcgatcaaacgcctgctggaagatgccgtgcggctctatagccggccggatctgccgcagggctgcatggtggtctcctccgccgccagcgtcagcgcagaaaacgacgggctcaaagtctggctggcagagcaccggctgcagcgcacgcagcagatcgtcgaacggctgcgccaggcggtgcaaaccggcgaactgccggccgacaccgacgccgacagcctgggagactatttcgccgtattccttcacggcctgtcgattcaggcgcgtgacggcgtcaccgaggcgcggttattggcggcggtaaacgtggcgctgacggttttgaacagcagcacttaatcgaccgtcaggtgccctctttaatgcggctcggatcacggcgcgatttttatgtggaaacatatggcggcggaggaactgcgtttccgataaaatccgcgatgtgaggattggtattttccggtttgtggatcagggcaacctgatacgggatcggcctccacttcctccgtcagcatgttgataggaggcaaacccaacgggccagtttaatacatgaaccagttaccattaacttcaacggcaatctccaagacacttcccggctggaaatcagagattttcatccggtttgcgtctgtcggattctgagaatcgtgaatgaagagcgcgccattacggtaagtggccgacttgatttctttaggtatcgaaaccgtaccgccgccgcccccggttacagggtaggtcttggtacccattacgtttgcgctaataacactcaagatcggctgatcggagccgtagttttgaccttccagatacttaggcatccacatccagttgagatctcccgtcaacgacgctgcgttagcggggattgttactttcaggaataccttatttcgcccagcagtatggataatggaacatggcgttgcgatttggccttcggttgtattaccgttgcgcatttgcaaggtagtaaccagaacccgatagcggaaggtatgggtctgatccatatcctcaccgtggacccacgccagtggctgcgtttccaaccggtcgacccacatacgctcgacgatctggcctttcttcgcgttaccgtcgtaaacgatggtgtaacgaatacagttatcgttttccttaggctgctgcttgtagacttcatcgaagtcttgaacccagatctggttgatctgtttcgcgttgttcacttcaccgctacgggcagtcagtgcgtaacgagtgttgatgttagcgccacgggaacagcccattgagccttctacgacaaaatacgggagcttatcgtagtcctggttgtacggatcgactttggagtgataccagtcgttggcatcagagttatcggcgctgttgttgatgtgaccagcttgctcgatgtaagcattgtggatttgaccataatagtccgtaccggttttagtcggcgcctggaatggtacacgggatgtccagtacgttttggcgttctcgatgatgacactcaggttgccacggttataacgagagtagttgatccacgcgcgatgacagatgccgcggtatttctcatgcgggttatccgtatcggcgccgtactgatccatgttggtcagacgccctccttctgaggtcttaaccgagtttttagacttatagaaatagtcatcaaagaacttatcaagctcgaagtgcttatcgccgaacttgttattacttccgttaccgacggtgatgtatttccacacacagtagtcacaccaccccagagaccagatgtccatggtggtataaggtggcacccattggccgccgtattgaacgttgttacgctgtagccacataccgccgacaatgaacgccgccatgcagttatccatggtttggataccgaagaagcagctatctgcgccctgaagcaaaacggggatgccgcaattacggtagatcatatcaccgaagtgtgactggtcgaaaatgacgccgtcggacagaatgccgatgaaggcattttgaatggtgaggtcggcaacacctacggcgcggacgaaccctgtcatgcgagttgtggttgggtaaccgtctggacggaataagatgccaatacgctggtctaacccaacgccgtgtacgtcacgcgaccagccaaaatcaagaatagtgttgacttgtttagagccacgcagttgaaccctgctcgggatctccagaacagcgttcatggtttcctggggttcaggacagatatccttatctttgcccatcgcaataatggcaggcgccgctgttccatcatcgaacggtaaagtatatttggcactgtacgaatagaaaccgaatcggtatacattacccatacacagaacttcaccgccgccatttttcttagcggcattaatggcggattgaaacgccaccgtgttgtcgaactgccagtctcctggtttggcgccgaagttctccacatccagtgtttgattgacacgcgtccaatagaatccttggccagcggcgataaaaccgttatcgtcgacgccatccccaatagtggcaacaaactcaccgccgccaaagcgaagccctggcaaccaggatttcagaagaatgcgatcaccggtggcggagggtataacagtacgaagttgttcgaaactttctacctgattgtctatttgatcactcattggaaaacatcctgttagatatagagaacattaatgttaatcgttaacaaaacaccgctgtaaaaagcgcggcactgatttaattccttaatcttattttttctttggatcacggatgaaaaagattgatgtcatttgctctcgttagcctgaagttcacatccttattcgcacagctatgctgttgtaaacaccacccttaaagccttccagataaattatgaccacaaagatgcatcggtcaagaaatcatggcgaatttctggcaacaccattaatttattgaatttttactgtccattcattatttaatgatattcactcacctgcaatatttagaaagtaaaaagccgacaaaaacgaaaaaaattccgaaataagcagcctattgaaattatttgcctgcgcctggataatgtgcagaataaatggacagtgcctttcagaattgggaactggcactgtcaaagttagccatttattttgacagacggcgaattacgcaatgatgttgtcgatttttaacataaacagattctgaactctttctaatctgatgttgaaaaagcactactataatgcattcctaaaagcgttggctcatctgaacaccactaacagccaaagataaccgtacgatgattttttattgttcacgtcctcgataaatcgcgccctttttccggcagatcgaaaatcaccagcgtgcctgcgctgcccggcaacacgcggtgcggcacgccggccgcggcctgatacagctgaccggcccgcaccaccacttcttcccccgccacctgcagccgcaggtggccgctgatcaccagcaacccttcgctgtaatcatgcacttcatccgcaatgctgcgcgcatccatgcgcagcactttgatattggccgcaccgacgcggcccagcacggcagagcgccaggcttcgggcagttcggccgcctgctggtttaaatcgaacagcatcggaattcccccaggtgcatgaaaaagcgcactctagcctgattctgcgccgcagggaaagacgctttggttgcaggttatgaccgttggttctgaggcgagacgcgccggatgaacgcttaaggcagcagcgccgcggcctcccgatcggcgataatcaacaggtccggatgcagcatcaaaatgctggcgggcactccgctctccaccggcccgctgacaatgcgccgcaaaatgtccgctttgtgcgaaccgttgacgagcagcaccagctttttggcggccatcacgcttgccggccccagggtgacgtaatgatcgggcaaccattcagtgcggccgcccacctctttgagcaaaatgtccgccatatccggcctggcggaaaccggcacccgacaggtgcggtcttcgaaggcggtggtgcccggcagattgccgcagaaatgcccgtcggctccgacgcccatcacgatcgcatccagcccgccatcctcggcgatacgccgatcgtgctgaaggtagttgtccgaattcaagacatgcagttgccgctcggggatcgccgccgggccaaagaacatacggtgcagattctccatggtgacgccatagcccgatcggccggcgtaaggaatttcatcgaaattatagtaatgcgcgttggcgaattccgcgtggcccttgatgcgcggagccaacaactcatacatccgtttaggcgtcgagccggcggtgatagccagattgacgcgctgcgggcgcagcatgtaactcaacaacaggctggcggccaactcactcatttcctggtagtcattagcgacgacaagtttcattcccttctcctttttgcaaaaaaaaacctaaccgcccgtccggccatgttcgatgccgggagagaagttaggttttgcctgatcgcgtcagtaacaatccgtttcttgtcaggttatggcggccagcaatgaaatgcaaaccgcgttgtgtgatgcaagccgcaattgcggcgatgcctttttcgcgccctataccggcacgcggcggctaatctccaccacctgatcgctgggcaggtagtaataatccgtgacgtgcatgccgttgcgcaccatcagcgcgaacaggttgcgctgccaggatggcaaccggtcgttcgcttcgcggcgcaccacggtctcgtgcccgagatagtaggtcgcctcgccgaagttcagaccggatttctgcgcctcgacgtgctgcaacagctgcgggatgttaggccgctccataaagccatagctggccacgccgcaccaaaagcccggcgacagctcgcgcatcaccaaccgttcagcattcgagacccgcggctcattgacgatggcaatggtgagcgccagcacgttggcgtgcagcgaaccgttacgcttgacctgccatttcatcaccggcggcgtcccctgcaggctgcgagtcaggaataccgcggtgcccggcacgcgcggcacggattcgcggcggattttctccaggaaatcctctaccggcactgtcgtttcaccgagggtgcgcgcggccgccagcaccccgcgatgccagaccagcatcacggtatagaccgcggcggccaacagcagcgggatataaccgccctgcagcactttagtcatgttggccgtcaggaagctcaaatcgaccacgaagaaaccgcccgccaccaacaggctggcgatcggcccccagcgccacacctcgcgcatggcgacgaacagcaggccggtggtcatgatcatggtcaacgagacggcgatgccgtaggcggcggccagattgtccgacgatttaaagaacacggtcaggaacagcgtcaccaccatcagcagccagttgatggcgccaatgtagatctgcccgtaactttcctcggtggtttgcttgacccgcagccgcggcagccaccccagttggatcgcctgccgggtcatggaaaacgcaccgctgatgatcgcctggctggcgataatcgtcgccagcgtggccaggatcaccagcgggatcagcagcgccggcgggcataaacggaagaagatgttctgcgtgacatcggcgccgctcaggatcagcgcggcctgaccggcgtagttaagcaacaggctgggaaaaacgatgccgaaccaggccagccaaatcggccgtttgccgaaatggcccatatcggcatacagcgcttcggcgccggtgacgcacaaaaatacgccgcccagcaccaggaagctggtcagtccgttggagaacagaaagtgaatgccgtagagcgggttcagcgccagcaaaaccgccggatgctggatgatgccccacacgcccaacgcagcgatcgacaggaaccacagcgccatgatcggcccgaacacgcggccgatgcgcgcggtacccagcggctgaatggcgaacagactgagcaaaatcaccaccgccgccggcagaatatagggctgcgacgccggcagcacgatgttcaacccttcgagggccgagagcaccgagatggccggcgtgatggcgccgtcgccgtaaatgagcgcggcgccgaacaggccggcgaacagcaccagcggccgggattttcgcttgctgaccagcagcgacatcagcgccatgataccgccctcgccgcggttgccgatgcgcatggcgaacatggcgtatttgagagaagtgacgatcaccagcgtccagaatatcagcgacagcaggccaaggatcaccggcgccgaaggcgcgtcgccggagagaaacagcacggttttcagggtgtacagcgggctggtgccgatatcgccgaacaccacgcccaatgcgcccaacgccagcggcgccagccccgtcttattcacggtttccgtatcattgccgacagacatctgctcgctccttgacgttgcgctgagagtgggaattgttgtcactttatggccgtcgcgccacgtgatcggcaagttaagcatagccgtcatcttcgccagtgacagtatcgcgctttgaagcttcagcaatcatcgccggtgagcaacggtttaaaaacgcccaccccggagggcctatcactttcctgttggcgtggcgcgcgtcgtgggaaagtgaaatgaacgtccggctctcccctgtttaagcccggtgttacgcgagccggctctcatcggcttcgcggcgcagccactgccgcagattttcgccttcctgcgacagctcgctatccagtcgagcgcacaggtaataatcgcggccgtcatcgatcggcagatcgaacattttgatcaactcaccgctctcaaggtagtgggcgattagcggttcacgcatcaacgcgcaccctaaccccgcctgcaccgccgccaacgtcaacaatccatcctcgaacatcgggccgatactgcgcagcgggcgcttgacgccggcctgctgaaaccattgcatccaggtattgcgctcctcgtcatgcagcagcggcagcgtcgccagctgatccggcgtatcgagcagaccgtgcagtttactgaatgcccggctgcacaccggcaccatttttccggacataagcttctcgctgcgatagccggtccactgcccgaccccgaagcggatcgacagatcggcggcgtcgctcaggtaattgcggtggttggcgtagaccacattgatgtcgatatccgggttttcacgcagaaaaccgcgcagccgcggaatgaaccagcccatgccgaacagcgggatcaggctgatggtcacctgccgcgacgcggattgttcacgcacgtgttcggtcgcctggcgcagcacgttgaacgccgagcgaatcgagcggtagtactcccgcccctcgctgcgcaacaccaggttacgcccctgccgttcggtcaacggcatctgcaaaaatgcctccagcgttttgagttgatgactgaccgccgaaggcgaaatcatcagctcgttagccgccgcgctgatgccacccaggcgcgcgatggcctcgaacgcccgcacggcgcgcagcggcggatcgttaggcagcatcggcaatggctcatcgtactgttctgtttttttcatatattgactgtttttgggaaatcgacactgaaggaatggattcaatatacataaaaatcaatacattaaaatcactcgttttttgtataagaaagtatttttccgtattttacaatttttttaaattctctactgtgagcctctgactcattatctccggactctccttatggatacgctggtacagcaaaccgtcaacggtttgatgctcggcagcatttatgcgctgatcgcgctcggctacaccatggtgtacggcatcctgcgcatcatcaacttcgcgcacggcgacgtactgatggtcggggcgctgagcgcgctgtcggcgataaacgtgttgcaacaccactttcccgcgttatcgccctacgccacgctgctgctggcagccctgtgcgccatggcggtctgcgccatcacctcgatggcgatcgagcgtctggcctatcgccggttgcgtaatgcaccgcgcctggccccgctgatcagcggcatcggcgtctcgctgctgttgcaaaccctggcgatgctgatctggtcacgcaatcccctgatgtttccgcagctgttgccgatgacgcccatcgccctgaccgcaggcagcgccgaacatgcgccggcggtgatcaccggcacggcgatcgtcacgctggcggtggccgtagcggtgatggccggcctctggctgctggtcgaacacagccgtttcggccgcgccatgcgcgccacggcggaaaacccgcaggtcgccggcctgatgggcatcagtcctgaccgcatcatcgttctgaccttcgcgctcggcggcgcgctggcggcggtcgccggcatcatgatggccagcaactacggcaatgccggtttctcgatgggctttctgcccggcatcaaggcgtttaccgccgccgtgctcggcggcatcggcaacctgcgcggcgcgatgctcggcggattgctgctgggcctgttcgaatcgctgggcaccggctatctcggcgagctgaccggcggcgtgttcggcagcaactaccaggacgtgttcgcgtttctggtgctgatcgccgtgctggtcttccgcccctccgggctgttgggcgaacgcatcgccacgcgcgcataaggacatcaccatgaccgttttgactccccccgttcctctggccacgccgcgtcgcgccaggctggggctgacgttgttcattctcgccctgctgctggcgccctgggtggcgggcgccgccggcggcaactattgggtgcgcgttgtcgacttcgccttgctgtacctgatgctggcgctcgggctgaacatcgtggtgggcatgaccggattgctggacatgggctttatcgctttttacgccgttggcgcctatctggccgcgctgctgtcgtcaccgcatctgacgcagcagttcccgctgctgctgcagtggttccccgacggactgcatctgtcgatgctgtggctgatcccgctggcggcgctgctggcggcggcgtgcggcatcctgctcggcgcgccgacgctgcggctgcgcggcgattatctggcgatcgtcacgctgggctttggcgagatcgtgcgcattctgatgcgcaacctggatcgcccggtcaacctcaccaacggccccaaaggcatttccggcgtcgatccggtcagcctgttcggcctgaagttttccggcatgcatgagtggttcggcgtgcgtttttccggcctgtacctgtattactacctgttcgccgcgctgcttctggcgatcctgtgtatcagcctgcggctgcagaattcgcgcattggccgcgcatggacggcgatccgcgaagacgaggacgccgcgcgggcgatgggcatcaacacccgcaacttcaagctgctggccttcgccatcggcgccaccttcggcggcgtggccggcgcgctgttcgccgcgtttcaaggcttcgtgtcgccggaatccttcaccctgcaggaatcgatcgccgtactggcgatggtggtgctcggcggtatggggcacatccccggcgtgatcctgggcgcgctgctgctggccgccctgccggagctgctgcgcagcagcatggggccgctgcagcaggcgctgttcggccaggtgctgatcgacccggaaatcatccgccaactgttctacggcctggcgctgatcctggtgatgctgtatcgcccggcgggcctatggccggctcgccatgccgggaggaacgccgcatgacgccgctgctcactttaaatcacgtcagcaaacgtttcggcggcctgacggcggtggatgacgtcagcatgagcatccgccagggggaaatctacggcctgatcgggccgaacggcgccggcaaaaccacctgcttcaacctgatcaccggcctgtatcgcgccgacgagggcgagttctgcctgttgggccagcgctataaaccgcaggccatcgacaaagtggcgcaggccggcatcgcccgcaccttccagaacctgcggttgttcaacgaaatgagcgtgctggaaaacgtgatggtcggctgccatgtgcgcacccgcaacggcctgtgggcggcgatcgctcgccacgggcgcgctaaagaggaggaacaggcggtgcgcgataaatctcatgcgctgctggaatacgtcggcatcagccaattcgcccattaccgcgccggcgatctcgcctatggccaccaacgccgtctggagattgcccgcgcgctggcgaccgagccccggctgctggcgctggatgaaccggcggccggcatgaacgccggtgaaaaagtggcgctgcgcgagctgctgctgcgcatccgcgacagcggtaaaacgctgctgctgatcgaacacgacgtcaaactggtgatgggtctgtgcgatcggctgacggtgctggattacggcaaagcgatcgccgaaggcgagccggcgcaggtgcggcgtgaaccggcggtcattcaggcctatctgggaggcggcgcgcatgtctgaagccctgctgagcgttaaacgactcaaagtgtcttatggcggcattcatgcggtcaaaggcatcgattttatggtcaacgccggcgaacaggtgacactgatcggcgccaatggcgcgggcaagacctccagcctgcgagcgctgaccggcctgcagccgttcgaaggcgacatcctgttcgacggtttctcgattcgcggcgtgccgccgcaccggttgctgcaacgggggctggtgatggtgccggagggacgcggcattttcacccgtttgacggtacgggagaacctgcagctcggcgcctatgcgcggcgcgacaaatcggcggtgcggcaagatttcgaacgggtgtgcgccaccttcccgcggctgagcgagcgtctgcaccaaccggccgggctactttcgggcggtgaacagcagatggtggcgatgggccgcgcgctgctcagccgcccgcggttgctgatattggacgaaccctcgatggggctggcgccgattgtggtggaagccattttcacggtcatcaagcagttagcccgtgacggcgtcacgctactattggtcgagcagaacgcccgcctggcgctggagtccaccgatcgcgcctatgtgttggacagcggcagcctgagccacagcggccgttccgccgacatgctggacgatgaaaaaatcaaacagatctatttgggtgaataaccgttgtttcttttaaccgcaccaggagtatgacatgcaacagaacattcgcatcaaaccgttggcgctggctgccatgacaatgattcttagcctcccggcgctggcggccgacaccgtgctgatcggcctggccgggccgctgaccggcccttccgcgcgcatcggcaaagatctcgaaaacggcgcgcaactggcgatcgccgacgctaacgcgcagaaaccgacgctgaacggcaaaccggtcaccttcaaactggtgtccgaggacgaccagtccgatccgcgcaccgccgtggccgtggcgcagcgtttggtcgacgaaggcgtcgccggcgtggtcggccactggaacaccggcaccagcatcccggcggcgcgcatctatcacgacgccggcatcgcccaggtggcgccggtcgccaccggtcacggctatacgcaacaaggttttgacaccagctttcgcgtgatgggccacgacgacgacggcggcaactacgccgggcaatatgcggtgaagacgctgaaagccaagcgcatcgcggtgatcgacgatcgcaccgctttcggccaggggctggcggacgaattcatcaaatcgctgcaggcccagggcgtgcagccggtcgcccgtgaatacgtcgatgacaagaccgtcgatttcagtgccgtgctgaccaccgtgcgcagcaaaaacgccgatctgatcttctttggcggcgtagattcccaggcggcgccgctggcgcgcaaactgaaacagctgggcatgaacgcgcagctgatgggcgccggcggctttgtcagccaaaccttcctgacgctggcgcagcaggaaggtgaaggcgtcgttgcgttggagccggggctgccgctggaacagatgccgggcggcaaggcgtttgagcaagcctaccgcgatcgttaccacacccacatcgaactgcatgcgcccttcgcctacgacgccacccgagtgctgatcgccgccatcgaacaggccggctcggccaacccggccgattatctgccgaaactgcgcgccatacattatcagggcgtgaccggcgccatcgccttcgatgcgcagggcaacctgcaacagccgagcttcaccctgtatcgggtggttgacggcaaatggcagccgcaaaccgtgttgggcggcgccaaaccacaataaatcaagaggagcaaggcgatgagctgtgcaaacaacgagttgggcattttggcccgcagaaaaatcgaggcggagatcatcaaaccgatctaccagatcctggtgcgtgaaatcggcaaggcgcgcgcccaggcggtgatcggcgaggccatcgagaatgccgccatcgcggcgggcaaacagttcgccgctcaggaaccgaacggcgcggatctgcgcagcttcgccgccttgcagtacctgtgggaaaaagacgatgcgctgcgcgtcgaggtgatcaatcaggacgaacagcacttcgactataacgtcacccgctgccgctacgccgagatgtatcacgagatggggctgggggagatcggccacctgctctcctgcgctcgcgacagccagtttatcgtcggctatgcgcctgacgttgaactgcagcgcagccagaccatcatgtccggcgccccctgctgcgatttccgctacaccgctaaaacaccgggagaagatcaatgacgtatcgggtcaacggcgagcgcctgtggcaaagcctacagacgatggcgcagttcggcgccatcgccaataacggcgtcacccggctggcgctcagcgaagaggatcgtcaggcgcgcgaccagctgcgccggtgggcgctggaggcgggttgcaccgtacgcgtcgacaaaatgggcaacatgttcctgcgccgtgaaggcgctcgccccgagctggcgccggtcgtcaccggctcgcacggcgactcgcagccccgcggcggccgtttcgacggcatctacggcgtgctggccggattggaggttattcgcagcctcaacgatcggcagatcgtcaccgaacgcgcgattgaagtgatcaactggaccaacgaagaaggcgcccgcttcgcgccggcgatgatcgcctccggcgtgttcgccggggtatttgacctggaatacggcctgacgcgccgcgacgagcacggcgtcagcctcggcgaggcgctggagcgcatcggctacgccggcgagtatccggtgggcggcgcgccgatccatgccaccttcgagttgcacatcgaacaggggccgattctggaagcggagcatctcgacatcggcgtggtgaccgccgcacaagggcagcgctggtatgaactggaggtcgtcggcttcagcgcccatgccggcaccacgccgatggaccgccgccgcgacgccctgctgggctttgcgtcgctggccacagcggtcaatcgcatcggctgggatttcgcgcccgacgcgcgcgccacggtgggcatggcgcaaattacccccaattcacgcaacgtggtgccgggacgcgtctttttcagcgtcgaattccgccatccagaggagtcaattctggagcagatggagcagcgcctgctggcggcggtgaacgccgtcaacgacggcagcctgaccgcgcgcgccgagcgcatcttccagtatcccccggtcgctttcgatcggggctgcatcgacagcgtacgtcatgccgcgcaagcgttgggctatcgccatcgcgacatgatttccggcgccggccacgatgcctgttaccttaaccgcgtcgctccgaccgccatgattttcattccctgcgtggacggcatcagccacaacgagcgggaagatatcacccccgcctgggccgtcgccggcgccgacgtgttgctgaacgccctgctggcgcacgccggcgcctgatcctcaccccggtttcttgccggggccaaaaaatattcaacaaaacggttgaatattagcccgcctgttctatattcaaccatatggttgaattatcttcctcacagctggacgccatttttcatgcgctggccgacccgacccgccgctcgatgttacgcgcgctggccggcggtgagcgcagcatcggcgaactggccgcgccgctgcagatgtcgttcgccggcgcctccaagcacgtgaaagcactggaacatgcgggcctggtgcaacgcaccgtgcaaggaagaaaccatatctgccggctcgaacccgagcctatggcgcaggccatgcactggctgcaaacctatgaacatttctggactgaacggctggatgcgctcgaacaggcgctgctgcagcccgaacagcttcctcccaaggagtgaaccatgaatgattacggtatgattatcgaacccggcacgctgcgcatccagcggctgctgcccggccccatcgagcgggtgtgggcttacctgaccgaatccgacaagcgcgccacctggctggcggccggcgccatgaagttggaaaacggcgcgccgctggagctggagtttcgcaactccgatctggcgggcgagcacgagccaccgccggccaagtacaaacagcacggcggctgcgtcagcaaccgcggccacatcacctgcctgttcccgccgcgcctgctgagctttacctgggccgaacaggatcagggccgcccttccgaggtgaccttcgagctgacggaacagggaaacgcggtgctgctgacggtcacccaccggcgcctggccaaccgcgacgagatgctcagcgtcgccggcggctggcacacccatctggatatcctgctggatcgtctgcacgatcgggcgccgcagccgttctggagcacccatgcccggctggaagaagagtaccgcgcccgcctgtaattacgactcgtccctgcgcctgaacgccagataaccggcgatcagcgtaaaactgccgaccagcaacaccagcaggataaaaccgtggtgattgctggccagcggtatccctccgacgttcatgccgaagaaaccggcgacgatgttgatcggcaacgccagcacggtgatcaccgtcagggtgtagagcgtacggttattctgctccatcagcttggcgcccagttcttcctgcagcagccggatgcgttcggtcaggctggcgagatcgttcaacaccacggtgaactcttcggtaaactgccgcagatcctgcaccacctcgcggctcagccaggccggcggccggttcaacaggcgaaacagcgcggccggttccggcgccaacaggcgctgaaagcgcaataacatgcggcgcatgcgccccagctcggcgcggttgcgcttgacgcggcgggtcagcaggcgatcctcgatggtatcgacatactggttagcctgccgcaccacctgctccagcacgtcctcctgctcttccagcaggtgcgccagcagctcggtagacgatgccagctccagcgccgtcagccggccaagcagccgttcaatcaatcgcaccggtttgtgacgcacggtgaccaccagcccacggcagcaatagagccatagcgtcgccgtttccgggttgctgtcctcagggtggaaaatcacgtcgttgagcaccgcgaacagatcgtcgccctggcgctcgatgcgcgtggtgtgggaaccgtgccgaatttcatggaagaaaaaatcggaaatggcgaaatggtttttcagccacttctccgccgccgcgtggttgagattgaggtgcagccagataaaaccgtcgccgggcgacaatgtttggtaagcctggcaaacctgctgcgagttcaggcgcgccggcggctcgccggagcgaaacgcatggccgtagatcagcccggtcacttcatcatcaaaatccagcttatgcatcttttccgctgccgtttgcaccataacgccttatcctgcctatggccgttagcccagatcgtccacgctgttataacaatctttatcgctcggcgttaatgattttcaacgctcttgctcattaatattttcgtcataaaaacgtcatttcattttaaaagttttcatcccctgcccgttcagcaaccgcacaaacggggccgcattcgcggtcgctttatcagctaaagaatgggctattcaataaatcccagtttgaactgcgccttgcccgccagcgacatcaggctcgcatcttcaggataggtcgccagcagcgggaaaaagactgcgccgccgataatgctgcggcgctttgaatctgccgggcgcagcccccagatattctggtacgtcatcggtacaacctggccgtcaacgagcgcattgccgatatacagcatgatatggcccggaatataaaccagcgtggtgaagggtttgccgtgatctttgagatagcgcagccgttcacgggtgttcgcttgagcaagatcaaccacccgggtggccgcctgtatctgcgcggcggaatttctgggaagaaagaggccaaaaggcatcaacagactgcgcagttcggcggagcagtcattattgaagttatagttcccccagccataaggcctgccgctcattgaccgcatcagtacggcaaaatgttcgggcgtcattttccacggcatggcggcaaattcccccttcttgacaacgatccggcgcatctgtgcgcggccatcctctcggcgtaccggcacggcgaccacaaaaagaccctgtcggtgacggtaaaatggcaggatcgtgccgtggcgcgccgtaaaataaaattggccgccggcttgcaccgtgaccggctgtttaatgaatgcccccagatttttctccgccagcgccagccattcggtgacaaactgccgatccaccgccgcgatgtcttcgctatgcacccatccgatcaccgttggcgacgcgacgtagttccagcgtttatcgcggctttgcgtaataacgtatacaggcgtaccgggacggatagatgaatcctgtaaattatcaaacggataaccctgtccagccaggcgaggatcgtcataagccggatcggccgtcggcaggatcctgaccagcgtttccctgactgcaatgcccctgcccgcaggatggaacgccttatccatgtcggtcgacgcgttatctctgacttgctgtttccagcggtcagtgtgagtcctgaagttttccccccaggagacactttcacttcccaggtatttatccattgcggcatcacggcggctttgcgcttcacggttcaggacggaagcgatgtaatgcggattccagggggattgatcattcggccccatgccaaaatagtgggatttgagggcggagaaatggcgctgctgcgcggcggcatccatcacaggcacccgccgttgcgggccataggggatccatttatcgacagattgcgagtagttacccagcgggaatagcgatttggtcgcatcgataggagttgtcgctacggcgtcttgaggtggctctctgaccggcgcactatggcaggccgacagcaacagaagcatcatcaatacaaagggttttattccattaggcattttttatcatctccgtgacaggtgaaaatttcttcttcatcctgaccagaagtgattgcaaatgatactcaataacactatcgattgacgcccggttgaggaacaaaacgcaaaagcaagcccgcccgcttgctcctgcgccctcacattctcaccacgccaacagacgttccagcgccgccgccggccctttacggccgataagcgccgcccgatgccagatagagccgctgtcgctcacccactgctcgcttacccactggctccgggccaggctgcgcagtgcctggatgctgtcgacggtgttatacaccagccaggcgccgaacaatacgccggccaaggcgatccacagattgaccgttgcggccagctgcgcgatcaacaacagcaacagcgccatctgcagtaaggttttagcggtgaaagcgcacagaaagaaggtccgcattcggttttccagcgcaaaacaggggttggttaacacctggcgggtttcctgtaccggaatgccttgcacatagaccatccattgcgaagcccgtcggggattcatcgccacgcccttttccgccagctggtgtaaccgcatcgaaacggcgaccggccagacgagcgcgagcagcaggcaatagaagaacgccgcactgacgccgcacacgcccaatccgatcgcggccagcaccgccagcagagccttgccggagtaaaaccaaaacggcaccacttggtaattcataaagttcccttttaagtccattaaccagtccgatagattactcccttatcaaggcgttaaacgcgagggaacaaaaaatttttgctgttacgcagaacgcgatcggcccctctatcctgcgccgccaaacctgctaacctgcgcattttgatttttgacaggagtcttccatgcgccaacgcatcattgtctgcccgctgattgaaaacgataacgccttcctgctgtgtaaaatggccgcccacaaaggcgtatttcccggccagtgggcgctgtccggcggcggcgtcgagccgggtgaacaaatagaacaggcgctgcggcgcgaagtgcgcgaagagttgggcgccgcgctgatcctcgacaacatcacgccctggactttccgcgatgacgtgcgcgtcaaaacttacgccgacggcagccaggagcaaatctacatgatttacctgattttcgactgccatgccgccaaccgcgacgtgacgatcaacgacgagttcgatgactacgcctgggtgccgcgcgagcgcctcgcggactacgatttgaacgaggccacccgcttcaccctgcggcaaaagggattgttgtaacagtttgagcgattatcgccctatttccttcacatttgccgggcagactcttttgatattttttaatcacttagggtcactattgccgccgttatgcttttatctcacgcttttctccgtctgcctgtccggcgcttcagcgccgccctgctgttcagcctgctgttcgttttggcgcccgtgcatgccgctgcaccgccgctggtgctgaatgccaaatcggtgctggtcgtcaatcaacgcaccggaaagaccctttatcagaagcagccgaaccgcgtgctgccgatcgcctcgctcaccaaactgatgaccgccatggtcgccctggacagcaaacgcccgatgggcagcaagctcaaagtcaccgccgccgatcgcgatctgctgaagaaaacccattcgcggctgaccatcggctcggtgctcagccgccgcgacatgctgcacatcgccctgatgtcttcggagaaccgcgccgccgccgcgctgagccgcagttatcccggcgggcgcaaggccttcgtggcgaaaatgaatcagaaagcgcgcgccatcggcatgaaacgcgcccgcttctacgatccgaccgggctgacgccgcgcaatgtggcgaccgccaacgatctgctgaagatggtcaatcacgcctatcgctatcagtcgattcgccgcttcagcaccgacaagcagcagatcgtgcgccccggccgcggccagttggtctaccgcagctccaacggcctgatcaacaaccccgcctggaagatccagctgcagaaaaccggctttaccgacgaggccggtcactgcctggtgatgcgcaccaccatcaaagggcagccggtggtgatgatcctgctcggcgcgcagccgcgctacggccactaccgtgacgccattcgtctgaaggcctggctcgaggggtaacatcgcggcgctttaccgttctgcgcatatccaaatccgttttggatcaatggaatatcctatcgccaatcagtattaagccgtgcgctgcccgcatggtatttgtcaggcatatctgatgaggaaaggagcgggaaaaatggcttatgccttgagcatattggaaaaaagtccgatagccgacggggaaagcgccgcgcaggcgctggcgcgcacgctgcagctggcgcaacgggcggaacgctgggggtatcggcgtttctggctggccgagcaccacaatacgccgcagctcgcctgcccgtcgccggaagtgctgatcggctatctgctcggccaaacgtcgcacattcgcatcggctccggcggcgtgatgctgcagcactacagcgcctacaaggtagccgaaaacttcaacctgctggcggcgctggcgccagggcgcgtcgatctcggggtgggcaaagcgcccggcgggctgccgctcgccacccaggcgctgcaggccgcccatgaccggcaaaacaaaccggccttcccgcagcagctgtcgcagctgaccgcttacctgaacgacgacgccgaaccgggcctgagcgccacgccgctgccgccgcagggcgcgcagcgttttctgctcggcgccagtaaagagagcgcgacgctggcggccgagtccggctgggccttcgtgttcgccgcgcatttgaatggcaatccgcaggatatccgcgacgcgctggagcactacgccgcacacagcggcggccgcaaggcgctgctggcagtggcggcgatcgtggcccccagcgaggaacaggccgcggcattggcggcggagattcagcaataccgcgtgcacgtcgccggtgagcagagcgtgaccgtcggcagcctggcgcaggccgagagtttcgtgcagcaggccggcgccaccgactaccgcatcgagccgcgggaaagccatattctgctcggcaccgcgcagcaggtgcatcagcaactggcgcagctacagcaacagtacggcgtggacgagttcatcatcgacacgccgatcgccgaaccggccgcccggttagcctcgctgcagttactggcggaagagagtttgacgccggcttagttgatcgccgccgccgcccgcatggcttcggacagatcctgcgccagcggcgccaactgcgacggcgtgacgttcgccaggctgacgcggagcgccggaccacacttcaggcggaaaggttcaccgccctgcaccagccacccccgctgcgccatcagctgcgcggcggcggtttccgagcgcaccggcacccacagatgcagcccttcacctaccgccagcgccgtgtgattcaacgcattgagccgctggaccagctcatcccgtctggcctgatacgcctgttgcgcccgctgcaattgcccttcctgcaaggcttgttcccacagtctggcggcgatctgctgcaagatatggctgacccagcgttcgctgatgtactgatcggcgcgcatcgcctgcagcaaagtcgggttgccgcaggccagcgcgatgcgcagatccgggctgagaaacttgctcagcgacagcacgtacaggccgcgatcgccgtcgaacggcagatgcagcggctgttgcgacaacggcccccagaaatcgtcgacgatcgccagacactgcggatggccgcgtagaaaacctcgccactgctgcgcacgttgcgctgaaagcgaagcgccggtcggattatgggcacgcggcgtcaggatcaccgcgtcagccgcgccgctctccggcagccgacagccctgttcatctaccgacagcggcagcggccgcaggcgcaggtgacgcagcagcgtcaatagcggcggccagcagggatcttccacccacaccgccgccccaggctgcgcatggcagcgcagcgccttttccatcgcgtccaacgcgccggaaaacaccgccggttcccccagcgtgacgccctggcggctgagccactcgcgtcccagaccggtcaataccggcaggtcgccgctgatgtcatagccgttttgctgcgggaacacctccgccgcgccaagcctcagcgccggcagcaaagcggcatccaggttgccgctggccagatcgcacattcccgccggcacctgacgcggcgcataggtcgcactcaccgccgccagcggcggctccagcaccaccgttcccgcccgcccgcgcgtcgccaccaggccggcatcgcgcaatcgggcataagcgctggcgacggtattcggattgacctccagctccgcagccagttggcgtaccggcggcaacagctcgcccggccgcagcgcgccgtctttgatgcgtgcggcgatctgctcggcaatctggacagcgccgccgccttttgcatacaataaactcatacataaatccttttgtactaattcaaacaagattagcagcttccgcggccaaaagtaaggggttccatggataaacattacgtgctcgacattcagtatgcaggaaaagcctttgcccgcctggagatgttcaccccctgggcagccgatcagctggagcaggcgtgcgcgctgttcccggccgcacagggttatcaggtgcagctcagccaggtcagcgaacgccgcatcgtctaccagagcggcgcgcagggcatcacggtgctgggcgagtcgctggcgctgacgccgttcacccacgctcacgaggttaaacaatgaaaaaagccgtcgccattcgacacgtcaattttgaaaacctgggtattctcggttccctgctctcgctgcgcggctatcagatcgactattacgatgccggtcgcgatgatattcgtgctatcaataatgaaaaaaccgatctgttggtggtgctcggcgggccgatcagcgccgcccggcacttttccggtgagcagcgctatgattttctcgaccatgaattggcgctggtcaaacagcgcctggcgcagcggcggccgaccctcggggtgtgtctcggcgcacaggtgatcgcccaggcgctgggcgccgacgtgatttcgctcggcgttaaagagatcggcttcgccccgctgaccacgctcgcggcccaagacgactcggtgctggcgccgctggccgatacgccggtgctgcattggcacggcgatatgttcatgatcccggacggcgcccgctgcctggccggcacggcgatttgcccgcatcaggctttcgactatcaggggttcgcgctcggtctgcagttccatctggaggcggatcaccgcgatatcgaacgctggttgattggccatgcctgcgagctggagctggccggcatcgcgccccagagcctgcgcgaacaggcggcgcgccacggcgcacggctggaacagcgcgcgcggcaggtgttcgcccgctggctggataataacgaaccaaggatgtaactcatgcaacaggcttcacccttgcgatcaccgtccatcgacgtgatcagcattcaatctcaggtggtttacggcagcgtcggcaacggcatcgcctaccgtgccctgctgaaaaaggggctggaagcgctgcaggtgcccagcgtgctgttcggctgcccgccctattacggcaagccgcatggcggcgtcatctccggcgagtggttcggcggctttctcgacgatctgatcgcccgcggcgtgatgaaacgcacccgggcggtgatcgtcggttacctgggcgacgtgatgcagtgccatattctggccaactggctgcagcgggtgcgcgccctcaatccgcagataaggatctatatcgatccggtgataggcgattacggcgaagggatctacgtggatgagcgcatcgtcaattgctatcgttcaccgttcctgcggctggccaacggcctgacgccgaacggtttcgaactggagcagctgtgcggccgctctctgagcagccgggagcagacgcaacgcgccgcgcaggcgctgttgaacgacaccaccgaatgggtgctggtcaccagcgcgccgggcgtggcacagcacgaagacgaagtgggtttaatgttggtcacccggcaggaagcgcagtgctttacccatccgaaggtcaaatcggcggtcaaaggcaccggcgatctgttcaccgcactgctggtgagccatctgctgcgcggcgccgcgctcgacgcggccgtggttgccgccggcggcgaagtgtgcgacgtgctggccgaagcggcgcatttcggttgggaagagatcggcagcctgcgggcgttaaaaccgtaagacctgtggagagtcaggggcagcatgcccgcccctgataaatatcagcgttttttctttttgttgaaatccagctcgaaggcgaacaccgcgctctgaattttgcgctccatcgccagccccagcttgaggaaacggcacgacaggcgcgagaagtgcaccacctggtcgttatcgtcggtttcctgatcgtcgttgaccaccaccagctccatattgaccttgaagctgccgtagctgcccagatccagctccgcttttttgaactgcaggccaggctggaagaaatccggcagcgggccgtcgaaacgcaaaccgacgccgccggcggagagatcgtggatccgcagctcataaggcgtgccgtccgggtactcgccggtgcagaagaattggcgccagtgcggcgtagtgatgcggaattggcggcggcgctggatatagaccaactcctgcggcagccgggtcgagcaggcctggacgccctgatgttcggtcagttctgcctgaccgacggaaaactcgattttggcgtcgtggctttcaatcacgatggtgcaggcgccgtcgatggcgttttccgcttcctcaccgctaaacacgatattgtccggcccgacgctcaataacagactttgaaaccggtgctgctgattttctacgcgcagcggcgtgcgttgtttgcaaatttcacgcagaatcgccagaacttcaaaacgctcccgtttgataaacagtccgttatcgctgtgctccacacgtctctcctgactttttttctaatgacgtcttatgtattccttatggttatcatctctgggaatattcctaaagtcaaatttgccagcgttgccaggcctgcggcagcaggcgcgcgaaacgtttcgcccatgcctgttgcccgcgttcgtcggcgatcagatcctggcgaatttcgatgccgacgtaaggcaatccgcgccgttccgcgtgcaccggcaacgtgtagtcggtggcgtcggtcattgcatagggctcgttgatccccacctgcaaatccccctcttcgcgcagcagctcggccagcagccgggcgaattccgggtagcgattaaacagcaaccccacctgccaggggcgcgattcccctttgaacaccggtgtgaaactgtgcatggcgatcaccgccgtcggcagttcgcgcagctgacgttgccccaaatgatcgtcgatggcgtggtgatacggcaaaaacacctcacgctcgcgcgccagcgcgtgctcggcgtcaataccgatattgccgggtatcggcgtcagttcggacaaatgcgggatcgagctggcgatgccgggcgcccggttgcagtcgatcaccagccgtgaataacgctggtggatcagggtggcgtccagctgacggctcagatggcgcgacacgctcagcgcgccgatgtcccagccgatgtggcgttcgatctcccccggcggcaaaccaaggtcgccaagggattgcggtatcgccttaccggcgtgatcgcacagcagcaaaaagggcgctttgccgcgcgggatttccacggcggcggcagagggttcatcggcggacaataacggcgggataaacgaatggggcatgacgggctccggcggtggaaagcaaaacgtttatcgtagcgctatcccgtcgccggccccaaggtcgtgcttagatcaaaaaggcatgagtcagactgtagtcatgccgtctcggccggctgcggctggtgcaccgcgatgtaacgctgataccgcgatggcttgagccgcgtggtatccaccaacaccagcccgtcgatacagttgttgaacgccggatcggtgccaaagtcgataaactgtaccccgcccggctcgcacagttcggtgtactgcttgtacagcgttgggatcgagcagccgatattgctgagcaggctcttcagccgcaccagatcttcctggtagttgtccccggcaaactgcgccagcacctgcggcagcgacgccggataaggccgccgcgactgcgcgaacgcgtgatccggcgagaaatagagccgatagaaggcgatcagcaaatcacgtgctgccagcggcatgccgccggagatcgacaccgggccgaacagatagcggtactgcgggtatttcgacagataggcgccgatgcccagccacaaatagtccagcccgcgcttgccccaataggccggctgaatgaagctgcgccccagctcgatgccctgcgccaggatcggttccatatcgcggtcataatggaacaggctgttgctgtagatgctctccaggcccttacgcgcgatttgttcggcggtggggataaaacgataggcgccgacgatctccagctcctcctcgtcccacagcaccaggtgatagtaatcgtcgtcgtagctgtccagatcgcggcggcggccggatccttcccccaccgcgcggaaagcgatctcgcgcaggcgccccagctcgcgcaggattggcgtacgcgcttcgtcatggcgacgatagagatagatggttttaccgtccggcgttacccccaaccgttcgcagttcgccagcgcctttttcagctccagacgatcttccggcagcgcaatcggcgattcgctggcgaacagccccggcttgccctggcccagacgatagacgtggcggcgaaaacgctccgccagatccttggcgctggtgtggccgtcgtgccagttggcgaacggcacgcggccgccgacgcggatcttgatgcgcccgccccgctgctggaacatttcgcgcaccagcagcaaggtcgacagcggccggtagaccagagaggtaaagtagaacaggttgctgttgcgtgcgctgatgtggatcggcacgatcggcgcgcgcgctttggcggccaggcgcagaaaaccggtatgccagtggccgtcgcggatgcctttcgggctcatgcgcgacacttcgcctgccgggaacaggatcagcgccccctggttgtccagctgctgctgcatgccttcaatctgtttgcggctggttttataagcgacgttatccaccggcacgaacaggctgcgcagcggttcaatgtaggtcagcagctggttggccaccactttcacgtccgggcgcaccgcggcaacggcgcgcagcaataccaagccgtcgagcgagccgatcgggtgattggccacgagcaccaccggcccctggctcgggatgttttccagatcgccgtccaccagctcgcagctgaggttaaagtagtccaccacctgctcgatcagatcgagccctttcagatggggataatcggcggcgaactgtttgaattctttttcgaagagaagggttcttagcaggctgcgctgccaggcgggggtattgcggtgtggaaatgcatcttgcaacagagaatccaggctgaacatcgcgttatctcctgacgtagtcgctgcaaacttaagccagagccgtgactctgacatgtcagttacatgacaataaagtgaatccatcgactatcaggtatagcaaagtaatggcgaattgggagcgaaagacgcattttcgcccccacttgccttcacatcggcgccagcaacgcttcgatgcggcggtttaccgcgtcgcgcaggcgcagcagcggcccggcctggtgcggataacgcttgaaggtgatgcgcatgcccagctcactttctataagcgcttccaccgtcgcccgatcggtcaaactctccagcagctgcagcgcgcgcatgtcttgcagcccctggtgcagcacccgcaggcgcagcgactccaccggctgcagatcctcaccggggtagaccacgaacggatcgccggagggaaacgcatggccgctgtcggtcaccgcgtacggattgatgcgttcacgcgaatgggcgctgttatagaagttgaatccccagtgcagaaagccggcgatgcggtacagatacagctgcacgcccaatatgcggttgcgcgccgaaggctgagcgaagaagcgattggcgacctcagtcttctgcacgcagcagtaataggcccacaggccggggacctggtgttcgataaaaggttcgaggtggtcggtcgcaacgaccggggtttccaccaggccttgctgataaaacgcgaaatccgacagcgcatcgaaggtgcggaagccatccagcagcgggcgcagcgcggcgctggcgcgccggtaggccgccaggttgtccaacgtcggctcatcggaaacatggaaccatccctgccgttccagcccccgttcgcggaaccaggcggtcaacgccggcagcagcgcctgcaggaaacgctgatacgcttcgccctgcgcatcggtgtgccagccgaactgcgttcgcgtctcgccctgctcctccaccacgatcttcggcgcatgcgccgcgccccattgggtaaacagcggcgcgatttcgaagtgctcgataccctcttcctgcgccaacgccacccactgcgccagacggctgaaatcgaagccatacccgtgcgccgaatgtgtcaccctcaccaactgtaccgtggtgcgttcgccgccaacggcggtatccagcggcggcgtgaacagcggcgtcagcagcatattgacgccagcctgcaccgcgcagcgcacaaagttgcgcaccgcgcgccagtacgccgggctgaacaccgccaaacggtagtaatccgccaggcagtcggtgtgcagccattcggtgtgcaacagcgtttgcggcggcaacgccgcgggcaccagatgcagcgtcagtgtggcctcggccagcgcctcgccgctctgggcatccagcagccgcagggtcaacggaaagtctccggccagttgcgcgtcagccggcggcgtcagggtcaaccacaggctgccataatagcggcaggcggcaaaaaaacgccgttgcggcagcggcatcagcggatcgggaaataagcccggctcggtggtcaggtaattctcatcggtctcgcgataacagggaaaaccgctcggcaccgattgcacctggcgcacgctgatatactccgccagcggcccgtcgagttgataacacagctcatggcgagtctcattgcccggggtttgcaaacagtacaccgcctgccaggacagcacctcgttatttaacccgctcagccgattttccacggcaatgggcggcatattttggcgatgaaatactttttccaggcaatgcgtaaataccagagacaggcgcatgatatttcgccctctttattttggatgaataaatgttgtgagattcaggctagcgtcttttatcgccacaaacaatagccggcaataaaaaacgttcaagtggcctcctcggacagccccagtaagatttttttgtttatttgcatcacaaaaatgaaagaagctgaagcttgcacaataaaaatatttttaatccccattatggtgcaagggttatcagttattcctatgcctgcgaaggccgctaaatgccgcgccaccggggaaaaatcccgccaaaaggttaatgagatgtgaacaaaaacccctttcacttggccgtaaaagcctttcgattttaacaacaatgaaacattatcgccccatttttgggcgtttgggggtgtattgacacattgaaagttaagggatagaaagaatttacgttgcgaaaaacgctattcgtcgctcaccgaggggaaagcaatgtcaccgataaaaaataccggccgcctgctggcgcattctattcttgccagcgcattattattacccacactgctccatgccgcagataaaataactttacgctatgccgtttgggacagaaaccaattacccgccgaacaggagattgccaagcgttttgaacaggctaatccggatataaaaatagaaatagaattaactccctcggcgcaatatttcgttaaattagattccgccgccgccggcggcgtagcgccggatatattctggatcaatatgccttattttgtgcagtacgccaaaaacggcattatggagccgttggcgccctatattaaggacagcggccttaaactggacgacgtggtcgccagctcggtgaaagcctatcagtacgacggccaacagatggccatcccgcgcgacgtcgattccatcgccgtgtggtacaacaaaaaactgttcgatcaggccggcgtcagctatcccaccagcgactggagctgggacgatctgaagagcaaagccgccgcgctgaaaaacgggctgaaaggcgccgccttcccgctggtgatggacctcagcatcgacggccaggacagctacatgaacctgctgttccaaaacggcaatcacatcgtgcccaaggatggccagcctaccgacatcgccaacgacaagtccatctgggtctatcagcaactgcagggcatgatgaaagacggcctgatgccgagcgcccagcagatgagcgaagtcaaaaccgagaacatcttccagtccaaccgcgccgcgatggtctatgccggctcctggctggcggcgccgttcgccaataacccgctgatcaacgaccacatcggcgtggtgatgatgcccaaaattgaacgccagtccggcgtggcgcacagtctggccttcgccatgtcggcgaaaagcgcccacaagcaggccgcctggaaatatatcgccttcatgagcagcgaagcctcgcaggcggagctggccaaggtggtgatcccggccaacaagacggcggccaaggtctgggcgcagcagatccaaaaggttgacgtcacgccttatatccagacccttgaagtgacccaggcttaccccaccgccggcaccaatacgccgaagtggcaaaacatgtggatcgccagcctgaaaaagatctttatgggcgcggacgctaagcaggaaatggacaaatcggtcaagaagatcgcgcgcgtcatggagcagtaatcaccccgccgcggcgcgcagccccgagcgcgcgccgcgggggaaccacgctgaacgtcataggtgaggaatggcaacatgtcgctggcagaaacggctacggtcaccctgaaacacccccggcgcaccgcccgtcccgcgctcaatcggctcgaacgcgccgagcgcttctggggctgggtgatgatcctgccgctgttgttgggggtgacggtgttttacctgatccccttcttgcaaaacatcttttacagctttaccgatctgaaccaattcatgcgctggagcagcatcagcgtcgataactatctcaacctgttcgaagacgacgacttttacaccgccgccgccaacaccctgttctacgtggtggtctgcgtgccgatcagcctgagcctgtcgctgctgctggcgatcggcctcaaccagaatatccgcggcaaaggcctgctgcgcaccctgctgttcctgccggcggtcaccatgcccgcggcggtggccatggtgtggcaatggctgttcaacaaggacttcggcctgatcaaccaggcgctgggcctgctgcacattgcgccggtcgcctggctgtccgatccggatgtggtgcgcatcagcgtatccatcatcatcatctggtcgtcgctggcgctgaagatcatcattttgctggccgggctgcagagcattccacgccagttgtacgaagcggcggatatcgacggcatcggcaccctgcggcgcttcttctgcatcacgctgccgatgatggtgccgacgctgttcttcgtgtcggtgatgagctttatcgagatcctgcaagtctttgacgtggtgttcctgatgttcgaccgcgcactggtggaaaacgacgtgatgaccgtcaccaacctgttctacaagtacgcgttttatctgcaggaaaaaggttacgcctccgccatcaccgtggtgctgttcgccgtcacgctggtgatcaccctgattcaaatggcgatcggcaagcgcctgaaagtcagctgaggagctgcacatgaacgcaagcaagaaaacgctggtgtacctgtttatggggctggcggcgctggcctcggtggtgccttttatctggatgctggtgacctcgctgaaaacccaggccgagagcattcagatcccgctgacgctgctgccggcgcatcccagcctgcaggcctacggccgggtgatgcacgaaatcccgttcgccggtttttatctcaactcgctgctggcgaccttcttcaccgtcaccctgcagatggcgatcgccaccctggccgcctatggcttctcgcgcctgcattttcgcggccgcgacgcggtgtttctggtgtgcgtgtcgatcctgatggtgcccggccaggcgtttctgatcccgcaattcctggtggtgcagaagctggggctggtcaacagcatcaccgggctggtgctgccgggcattttcagcgtttacgccacctttctgctgcgccagtttttcctggcggtgccgaaggagatggaggaagcggcgttgatcgacggttacagctacttcgccatcttctggcgcatcatgctgccgctgatccggcccggcattatcgcctgcgtcatcatcaacggcctgtggagctggaacaacctgatgtggccgctgatcgtcaataccaccaccgagaagctgacgctgccggttgggctggcctcgctctccagccgcgccggggtggaatacccgttgctgatggccggggcgctgatggcggtgatcccgatgctgatgctgttcattattttccaacgctatttcatccagggcatcgccagcgccggggtgaaaggctaacgcgcagacaaggtaaacgacatggccggaattcagttaaacagcgttaaaaaagtgtaccccaacggtttccacgcgctgcacggcgtcgatctggacattgaggatggggaatttatggtgttcgtcggcccgtccggctgcgccaaatccaccctgctgcggatgatcgccgggctggagagcgtcagcgaggggcagatcctgatccacgatcgctgcgtcaacgacagcatgccgaaggatcgcggcgtcgccatggtgttccagaactatgcgctgtacccgcacatgacggtgtacaagaacatggcgttcggcctgatcggcaaagagagcaaggccgagatcgaccgccgggtgcgcgacgcggcggaaaagctggagatcaccaatctgctacagcgcaagccgggccagctctccggcggccagtgccagcgggtggcggtcggccgcgccatcgtgcgcaaacccaaggtgttcctgttcgatgagccgctgtccaacctcgacgccaagctgcgggtgtcgatgcgcgtgcaactgatcgaactgcacaaccagctgaagcaggaaggcgccgccgccaccatggtgtacgtcacccacgatcaggtcgaggcgatgaccatgggcgatcgcatttgcgtgatgaaccgcggcgccatcatgcaggtggataaaccgatcaacctgtaccaccaccccgccaaccgtttcgtcgccgagtttatcggcagcccgtcgatgaatttgcacgatctggcgatcgtgcgcgacggccaaacggtacggctgcgtatcggcctgcagcaccagctcgatctgccgcctgcgctgcaacggcaattggcggactacccgcatgcgcgggtgtgtctcggcatccggccggagtccttgcggctgtgcgcgcccggcagcgccaactgtttcccggcgcagatcgtcactatcgagcgcatgggcaacgaagagctgctgcactgcgaactggccgatttgcgcttcgtgctgcgcatggcgtcgctgccggattgggagccgcgcctcggcgaaaacattcatctggcattcgatctgacgcgcgcgcatttgttcgacgagctcagcggccaaaacctcaaataacaacagcggagtatccagcaatgtcgtcaacacaacccaacagctttgcccatcgcccggtgcgggtgctggtggtcggcgccggggcgcgcggtgaaatctactcgcgctatgcgctggcgcatcccgatttgatgcaggtggtggcggtagcggaaccgcgcgacgcctaccgcgagccgttcgtggcgcagcatgccatcgcgccggaaaacgtcttcaccgactggcgtcaggccgccgacgccggcaagctggccgacgcggtgctgatctgcacccaggatcggatgcacctcgaaccggcgctggccttcgcccgccagggctacgccatgttgctggaaaaaccgctgtcgccggacgccgacgagtgccgcgccatcgtcgccgaggtgacgcgccaaaagctgatcttctcggtcggccacgtgctgcgttacacccgctatacccaaaagctcaagcagttgctgcgcgacggcgcgatcggcgacatcatcagcctgcaacatttggaaccggtcggctactggcatcaggcgcactccttcgtgcgcggcaactggcgcaacgatcggcaggccgcctttatgctgctgcagaaatcctgccacgacatcgactggatccgctacgtgatggagcagccctgcgaacaggtcagctccttcggcaacctgcgccacttccgccaggaaaaccaaccggccggcgcggcggacaactgcctggattgcgcggtagaggcaaactgcccctattccgccaaacgcatctatctgggcgacaatcacaaggccacgcccggttttctgcgggtgctgacgccagagcccgaccagacgacgctgcgggcggcgctgcgcgacgggccttacggccgctgcgtctaccgctgcgacaataacgtggtcgaccatcaggtggtcaatatgcagttcgccggcggccgcaccgcgtcgttcaccatgacggcctttacccgccacgaagatcggcacacccgcatctttggcagccgcggctgcctggagggcgacggtcgccatatccgcatcacctcgttcctcgacgacggtgaaacgcattacgacaccgatgccggccaggatctgcacgccatggccggccacggcggcggcgactactacctgatgcagcactttatcgcggccattcgcgccaacgatccgagccaggtgctggccggcccggcggaagcgctggagagccacctgatggtgttcgccgccgaacgcgcacgccgcgaggcggcggtggtcaccctgagcggagcctaaagcatggcgatgagacagatgcgttacggcttcgacatcggcggcaccaaaattgaaatggccgcttacgatcgccgactcaatcaggtgctgctccagcgggtgcgcaccccaaccggcgattacggcgagttcgtggcctgcatcgccgggctggccgagcaggcggatcgcgaactgcacacgcgcggcagcatcggcatcggtttaccggggatcaccgatcccgtcagccgccgccagttagcggtcaacgtgccctgcctgaccgggcattgcctggcggatgacctgacgcaggcgttggcgcgacctatcgccatcgagaacgactgccgctgcttcgcgctgtcggaagccagcacgccgcaaaccgcgcacctgccgctggtgttcggcgccatcatcggcaccggtgccggcggcggcctggtggtgaaccggcaactgcacaaggggcgcagcggcgtggcgggcgaatggggccatatgccgatatcggcccagttggcgcaacgttacgatctgccgctgttcagctgcaactgcgggctgaccggctgctttgaacgctacgtctccggcagcgggctgctggcgctgagccgccatttctcccatccggccgctgacgtgccggcgctggtcgcctgctatcgtgccggtgatgcgctcgcacaacggttgatgaccatgtacgtcgacatcctggcctgcgcgctggccggcttacagctgctgttggacgtcgatgctttcgtgctgggcggcgggctgtccaacgtcggcgagctgtaccggctgttgccgccggcgatgcgacgctggctgctgcctggcatggagccggcggcggtgttcccgccggtgcacggtgacagcagcggcgtgcgcggcgcagcgcttttaagcgcgccggcataaaaaaaacagtgaaagcccggcggttgtcgagcgatcgctgcggctttcggcatcgatgggctgaatgaataagcgcagggaattggcgactgaaaaataacgaatttgccgttttcactttgcgttaacaccgctttcggttgccgctcaaccgaaagcaaaatcaaatataaccaactgatagatatagatattttaaaattaatcgattgcatttcagtgtttcgtttgctgtaattcgccacgaacaactgaaagcgctccggtcggtatcgctgcggcttattaagccgcggtcgggcacggctacaggtaaatcaggagtctgcattaatgatcaataccgcaaaacgccgggaattaattatcgaccagctgtgccgcgagggctcggtgcgtgtggagcagctcagccagcagttttcggtgtccagcgtcaccatccgcagcgatctgcgtcagctggaacaacacggctgtgcggtgcgcgcctacggcggcgccatgttgaacaaacagttcgccttcgaccgcccgctgcaggacaagggccgcatcaatcgcgacgtaaaacacgccatcgcctgcgcggcggcggcgctgattgaagacggcgacgccgtcatcctcgactccggctccaccaccagccaaatggcgccgcagctggcggggaaaaaggatctggtggtgatgaccaacgcgctcaacatcgctttcgaactggccaacaacgagcagatcgacctgatggtggtcggcggcagcgtgcgccgcaaagcctggtcgctgtacggccccgccgccgaacaacaactgcgccagtatcggttcgacaagctttttctcggcgtcgacggcttcgatctcgcgagcggcatcaccacgccggatccgggcgaagcgcagctgaaccgggtgatgtgcgaggtggcgcgcgaagtgatcgccatcgccgacgccagcaaattcggccgcaccagcttttgcatgatccgcgacatcggccagatccaccgcctggtcaccgacagccgcattcctgaacactatctgcaggcgctgcaccatttagggatcgacgtgattatcgccgaccgttaatcgaggctttttaaggagctgtcatcatgaacgcgtatttctcttacgagacgaattggctgaagcagcgcaacgcctggcataccgccgcagaaatttggcaacagccggatttgtgggcgacgctgcatcgccaactgcaggatcaacaggcgcagtggcagccgttcctggcgccgctgctggccaatccgcgcctgcaaatcgtgctgtgcggcgccggcagttcggcatttgccggccgcgccctggccccctggctgcgcgaacgcaccggccgcgacgtggtggcttacggcaccaccgatattgtcgccaacccgctacagtatctcgacccagaccggccgacgctgctggtctccttcgcccgttcgggcaacagcccggaaagcgtggcgacagtggagctggccgatcaattgctgccggaaagctatcatctgatgctggtgtgcaacccggacagccggctggcgcagtacgcgcatcagcgtggcaacgtctgctcgctggtaatgccgcagggcgccaacgatcagagcttcgccatgacctccagcttcagctgcatgatgctgagcgccgcgctgctgctcggcccaacgtcgcttgaggccgcccaggtgccgttgaacgccatggtgcagcgctgccgcacactgcgcgaaacgctgcagccgcaggtgaaggcgctggccgccagcggtttccgccgctatatcaccctcggcggcagctgctttaccggcctcgccgaagaggcttcgctcaagatgctggagctgaccgccggccgcatcgttacgcgctacgactcgccgcttggcctgcgccatggcccgaaatttatggtcgacggtcagacattggtggtgctgatgttctcccaccacgactacgcccgtcagtatgaccgcgacctgtggaacgaactgcagcgcgacggactggcaatgcagctggtcggattgaccggcgaacgccaacctctcgccgatgccctgctgcatatgcacgatgccgctgacgatatctggctgctgttcccgtatctgctgttcagccaaatgctggccttcgagagttcgctggcgctggggctgaccccggacaacccttgcccgaccggcgaggttaaccgggtggtgaaaggcgtgacgatttaccgttttccttcccccgagctgtaaggagatcccatgtatctgatagccaaccgagacatgctgctcaaggcgcagcgccagggttacgccgttccggcgtttaacgtccacaatctggaaaccgtgcaggtggtggcggagaccgccgccgagctgcgctcaccggtgatcatggccggcacgcccggcaccttcagctatgccggcaccgactacctgatcggtatctgtcaggcggccgcgcaccgctacgatctgccgctggcgctgcatctggatcatcacgaagcgctggacgacatcgagcacaaggtgaaaagcggcatccgctcggtaatgatcgacggttcccatttgccgttcgagcagaatatcgccaaggtggccgccgcagtggccctgtgccatcgctacggcgccagcgtggaggccgaactgggccgcctgggcgggcaagaggacgatctgatcgtcgatacggcggacagcttctataccgatccggccgccgcgcgcgagtttgtcgccgccaccggcatcgactcactggcggtggcgatcggttccgcccacggcctgtaccacggcgaaccgaagctggacttcgaacgcctggcgctgatccgcgaacaggtggacgtgccgttggtgctgcatggcgcctccggcattccggaagcaatggtcaagcgcgcgatctcgctcggcgtttgcaaggtcaacgtcgccaccgaactgaaaatcgccttcgccgatgcggtaaaaagctacttttcgcagcacccggacgccaacgatccgcgcaaatacatcgtccccggcaagctggcgatgaaagaagtggtggcggaaaagatccgcatctgcggcagcagcggcatgctgtaatcccgctctcgcccccgttgctgcggccgcgcaacgagggcgaaaacggctgccattgcccgactttcctgagagaacgatcacagcctgttatcccgcccgcgcctgaaatcattaaccggtcttcactatgatccaaatcatggttttactcatcctacctccctattatcaaattcattgaatgctggcagtaggatttttgcccattcgtttttatttcgccagacgaaatagcttattttatgaaaacaagcgcgcttgttttttaattggcagtgtttttactctgaaaggaacagcgtatgaaccattacttagccgtattaagcgcattggtcattctgcccttcgctctgcaagcaaaaccgctttccggcagccaggtcgcctctggcgtcgtgcgcttcaccggcgccattaccacaccggcctgcaccgtcaaacatcaggatgaaaagcttatctccagctgcttcggtaaagtgacggaatatcagaacgggtatatatcctcttcgttaaaagagatgccaaaagaattagtttctgccgtcagcagtgagttggtgaataacgatccccatttaaagcgcgtgactatcagctataagtaagcacaaagcgttactgcctgctgaaataataaacaagacacaacttgtcttgatgacttataaatttattttataaatttatcgcacaataactccccgccttaccgtaagccggctgttcgggcaaccctgcggttgcccatcagcatgtccgaaatccgccatcgctccctcccagttcatgcgataatcgccacactaaactgaggagtgagccagatgcagacttttttgattgatcgtaccgccacgccggtgggagaactggtgctgattgccgatgaacaggggcgcctgcgggcgatcgactggaccgatcacgaagcgcgcctgatgaagctgctgaacacccactaccgcgccgatcggtttaccctgcgcgaacagcgcgatcccagcgggctaaccgacgccatgcagcgctatttcgccggggaactgagcattatcgatcggttgccggtgatgaccgccggcaccgagttccagcgcaccgtctggcaacagctacgccaaatcccctgtggcgagatcctgacctacggccagctggcgcaacgcatcggccgtccgaccgcctcgcgcgccgtcggcatggccaacggttcaaatccgatcagcatcgtggtgccctgccatcgagtgatcggttcgcagggcgcgctgaccggctatgccggcggcgtacagcgcaagcagtggctgctgcagcatgaaggctacctgccgaaaagtttgctgtagccgctgcgatcggcttatccagcgccattgtttggcgctgcttaataaagcacagtgcccaacgccacgctcgtgcccgcagggcactattaataacttgtgtgaataaaacgcataagtcacaaataatactcataacttcagtccgatacagaataatcggcggcatgtgtgcgcaaaattcgcacacaatacccctattcatgctaatgccacccttatcagctgcagcaaaagatgttaaaattgactcatatcaattattgaatgagcgtaatctatgatcccggaaaaacgcgtgattcgtcgtatccagtctggtggttgtgcgatccattgccaggactgcagcatcagccagctgtgcattcctttcaccctcaatgctcacgagctggaccagctcgacaacattatcgagaggaagaagcccatccagaaaggccagaccttgttcaaggccggcgacgagctgaaatcgctgtacgcgatccgttccgggaccatcaaaagctacaccatcaccgagcaaggtgatgagcaaatcaccggcttccacctggcgggcgacctggtaggcttcgacgccatcggcggcctgaagcacccgagcttcgctcaggcgctggaaacctcgatggtgtgcgagatcccgttcgagaccctcgacgatctgtccggcaaaatgccgaacctgcgtcagcaaatcatgcggttgatgagcggcgagatcaaaggcgaccaggacatgatcctgctgctgtcgaagaaaaacgccgaagagcgcctggcggcgttcgtttacaacctgtcgcgccgctttgcggagcgcggcttctcaccgcgtgagttccggttgaccatgacccgcggcgacatcggcaactaccttgggctgacggtagaaaccatcagccgcctgctgggccgcttccagaaaagcgaaatcctcagcgtgaaaggcaaatacatcaccatcgaaaacgccgacgcgctgtcggtgctggccggtacgccgcgcatcaacgtgaccgtcaacgcctgatccccccgccggatcaacatttcaccgaaattgttgatccggcacgcttccgttgttgttctgtttttcaatgttgggttactctgtaaattaacagactgttgatttcagctgtaaggaggccctatggcgaagtatcagaatcttctggtggctattgaccccaatcaggacgatcagccggcattgcgccgcgccgtatacctggtaaaacggaacggcgggcgcatcaaggccttcctgcccatctatgacttctcttacgaaatgacgaccctgctctccccggatgaaagaacggcgatgcggcaaggtgtgatcagccaacgcgccgcctggatcaacgagcagtgccgcttctatctcaacgacggcgtgccgatcgaaatcaaagtggtttggcataaccgccccttcgaagccatcattcaggaagtgctgtccggtcaacatgacctgctgctgaaaatggcgcaccagcacgaccggttggagtcggtgatctttacccccaccgactggcacctgctgcgcaaatgcccttgcccggtgtggatggtgaaagaccagccctggccggaaggcggcaaggcgctggttgcggtcaatctggccagcgaagaaccctatcacgacccgctcaatatcaaactggtgcaagaaaccgtcgaactggcgcaaaacgtcaaccagaccgaggttcacctggtcggcgcctatcccgttaccccgatcaacatcgccatcgaattgcccgacttcgacccgagcgtctacaacgacgccattcgcggccagcatctgatcgccatgaaggcgctgcggcagaaattctgcattaaggaagagttcacccacgtggaaaaaggcctgccggaagaggtcatccccgatctggccgaacatctgcaggccggcgtggtggtgctgggcaccctgggccgtaccggtatttcagccgcctttatcggcaataccgcggaacatgtgatcgatcatctgaaatgcgacctgctggtgattaaaccggaaaacttcaactgcccgatcgaagcggatgaagatgacgaacacgacgacgaagattaggcttcgctcataaagaaacgggccgctgaaaagcggcccgtttttctttggttgcccaattctacttctgcagcgcccgcagaatcgcttccacgctgtctttggcgtcgccgaacagcatctgagtgttctccttaaagaacagcgggttctgcacgccggcgtagccggtgttcatcgagcgtttgaacgcgatcacgttctgcgctttccacacttccaataccggcatgccggcgatcgggctgcgcggatcttccagcgccgccgggttcaccgtgtcgttggcgccaattaccagcactgtatcggtatccgggaaatcgtcgttgatttcatccatctccagcaccacgtcgtacggcaccttcgcttccgccagcagcacgttcatgtggcccggcaagcgccccgcgaccgggtgaatgccgaaacgcaccttcacgccgcgcgcccgcagtttttcggtgatttccgccaccggatactgcgcctgcgccaccgccatgccgtagcccggggtgatgatcaccgaggtggagttcttcagttgctcggccacttcttccgccgtggtttcacggtattcgcccatctcttcggcttcgccggtggatgaaccgtcactgccgaaaccgccggcgatcacgctgataaacgaacggttcatcgccttgcacatgatgtaagacagtatagcccccgaagagcccaccagcgcgccggtgacgatcagcagatcgttgctcagcatgaagcccgcagccgccgccgcccaccccgagtaagagttgagcatcgacaccaccaccggcatgtcggcgccgccgatcgaggcgaccagatgccagccgaacgccagcgcgatcgccgtcatcagcagcagcgctatcacctgccagcccacgctgtcggtgcgcacgaacgccaccagcaacaggaacgagatcaccaacgccgccaggttcagcttgtggcgattcggcagcatcagcggtttggaagaaatgatgccgcgcagcttgccgaaagcgacgatcgacccggtgaaggtcacggcgccgataaagatgccgaggaacacttcggtcagatggatattcgccatcaccggctccatcggcgcgccgtgatccaggtagctgttgaagccaaccagcaccgccgccaggccaacgaagctgtgcagcaccgccaccagctccggcatttcggtcatctcgaccttcttggccagatagacgccgatcgagccgccgatgatcatggcgatgatgatccagccgacgttgccggaatccggccccaagatggtggcgatcagcgcgatcgccatgccggcgacgccgaacaggttgccctgcttcgacgtttcatgacgcgacaggcccgccaggctgaaaataaacaaaatagcggcaacaatgtatgcagctgtaaccaatcctccagacatttgttaccccttagttcttgcggaacatcttcagcatgcgctgagtgacggtgaacccaccgaaaatattgatgctggcgatcagcacggcgataaaggagaggaaactcacccagccgccgtggccaatttgcagcagcgcaccgaccacgataatccctgagatcgcgttggtaaccgacatcagcggggtatgcagcgcgtggctgacgttccagaccacgtagtaaccgaccacgcaggccagcgcgaacacggtaaagtgcgacaggaactctttcggcgccgcgtccgccagccagccgaacagcaggatcgccagggccatcaggccatacttcagccacggcgaggtcggtttggcttcgggtttggcggccggtgcggcggcgggcgccgctttcggctgggccgagacctggatcggcggcgccggccaggtgatttcaccgctgcgcaccacggtaacgccgcggatcaccgtatcgtcgaaatcgatgtcaatctcaccgtttttctctttcgacagcagcttcagcaggttgaccaggttggtgccgtacagctgcgaagattgggtcggcaagcggctcggcagatcggtatagccgatgattttcacgccgttgtcggtcacggtaatggtgtcggccacggtcagttcgcagttgccgccggtttgcgccgccaaatcgacgatcacgctgcccggcttcatcgacgccaccatctctttggtgatcagcttcggcgccggtttacccgggatcagcgcggtggtgacgatgatgtcaacctccgccgcctgcgcggcgaacagcgccatctcggccttgataaaggcttcggacatcactttggcgtagccgtcgccgctgcccgcttcctcttcaaaatccagctcgaggaactccgcccccatgctctgcacctgctctttcacttccgggcgggtgtcgaaggcgcgcacgatggcgccgaggctgcccgcggcgccgatcgccgccaggccggccacgccggcgccgatgatcatcaccttggccggcggcactttgccggcggcggtgatctggccggtgaagaaacggccgaactcatgcgccgcttcgacgatcgcgcggtagccggcgatgttggccatcgagctcagcgcgtccatcgactgggcgcgcgagatgcgcggcaccgagtccatcgccagcgcggtgacgttgcgcgccgccagcttggccatcaattcggggttttgcgccggccagataaagctgaccagcgtgctgccttcgcgcatcaaggcgatctcgtcgtcttgcggcgcgttgactttcaggatcagatccgactgccacacttcgctttcgtcgaccagcgccgcgccggcggcttcgtaagcgacgtcttcaaaactggccagtttgcccgccccgcgttcaatcgcgacggtaaaacccagcttcagcagttgttccaccgttttcggcgtggctgcgacccgggcttcattggccaaccgctctcttggtacaccaatacgcataatgttcccttctcacctgtcttggatgatgtttattattttcctgcccatagcacggcgccgccggcgagcgttgcattaacttgcccgcactgatttcaggcgccaactataacctactgaaaataaggtcgatgatccataattgcttacgcattcatccctgtttttacataaaaacgccgtgcgcgatatgacaaatcgcaatttacagttaaaaaatccatacagaacagcacattctgcgtgacaggaggtttacgcccggcgtaacgatttatggccgcgcgcggcgtaaaagcataaaagttatcattttgtgaataattaacattaatgacaccaaagccgttattatggaaacttatgacggcggtgccatccgtgcgccccgcgtcgccatcggcgatttgtcgcacgggataacataaaatgctgagacagttttcagaattacatgtaataatcgacggctgaattacacttaaacagttcagtacgttataaacgttaatgcgctaggcgaaaggattttttatgaagctgaagaccacgatcatcgcgtcagccttgttatcactcaccgcgctgtctgctcatgcggcgcaagagttaactcctgagaaagcagcggcgctgaagccgtttgatcgcatcacgattaccggccgcttcaatgccatcaatgaagccgtcgacgccgtatcccgccgtgcagacaaactgggtgccgattccttctatatccaggacagcaacaacagcaacaacggcggcaactggcgcgtcaccgcagacctttatcataaagatgcgccagaagtgagcaaaacaccaaaataccgcgtatttaacggcgtgaacgaactgcctaaagaggaagcctacctgctggagccttacgataccgtgagcgtcagcggcttctaccgcagccagccggatatcaacgacgccatctccaaagaagcgaagaaaaaaggcgccgcttcgttcttcatcgtgcgccaggttgacgccaactccggcggcaaccagttcgtcaccgcctacatctataaggccgatgcgccgaaacgccgcgtgcagagcccggacgccattccagccgattctgacgccggccgcgccgccctggccgccggcggcgccgcagccgcgaaagtcgaaattcctggcgtcgcgtcttccggttcgccaagccgcgaagtgggccgtttcttcgaaacccagtcctctaccggccaacgctataccgtcacgctgcctaacggcaccaagatccaggaagtgaacaacgtgaccgccgcgcagatggtgccgttcgattccgtcaccttcaccggccacttcaacagcatgaccgatgtctccaccgaagtggcgaaacgcgcggccgagaaaggcgccaagtactaccacgtcacccgccagtggcagaacaagagcggcggcaacctgaccgtcagcgccgatctgttcaaataaaacccgtttttaggtttaccatcgggcagcccttgagctgcccgtttttattgccgctttttccatcgcgtgttgaatagttttttgtaaattccgcatattcaatcattgcatctctaatcatccctccgtagaatttgcgccaatttttagggctattgtctattcgcgcagtggttgttaatacattgttgccgccaagcagttcccttccagttgtttattctgcgttcaggatccgtcattggaaaaaaaactcggtcttaccgcgctaaccgctttggtgctcagctcgatgctgggcgccggcgtgttcagtctgccgcaaaacatggcgcaggtcgccagccccgccgcgctgttgctgggttgggggatcaccggcgtcggcattctgtttttggcattcgccatgctgttgcttacgcgtttgcgtccggatctggacggcggcatcttcacctacgccaaagaaggattcggcgaactggtgggcttctgctccgcctggggttactggctgtgcgccgtgatcgccaacgtctcgtatctggtgatcgtgttcgcggcgctgagcatttttaccgatcgcggtggcaacgttatcctcggtgacggcaatacctggcaggcgctgatcgccgaatccgccctgctgtggatcgtgcacgcgctggtgctgcgcggcgtgcaaaccgccgccagcatcaatctggcggccaccctcgccaagctgttgccgctggggatgttcgccgttctggcggcgatcgcctttaaaatggacgtgttcacactggatttcaacggtatcgccctcggcaaaccggtgtgggaacaggtcaaggacaccatgctgatcaccctgtgggtgtttatcggcgtggagggcgcggtggtggtttccgcccgcgcccgcaataagaaagacgtgggccgcgccactatgctggcggtgctgtcggcgctggcggtgtatctgatggtcaccttgctgtcgctgggcgtggtgccgcgcagcgaactggcagagatgcgcaatccgtcgatggcggtgctgatggtagaactgatcggcccgtggggagacgtgctcattgccgccggcctgatcgtttccgtgtgcggcgcctacctgagctggaccatcatggcggcggaagtgccgctgctggccgcgcagcacggcgcgtttccgcgcgtgttcggcaagcagaaccgccatcacgccccgtcctcttcgctgtggctgaccaacatcgcggtgcaactggcgctggtgctgatttggctgaccggcagcaactacaactcgctgttgaccatcgcgtcagagatgatcctggtgccttacttcctggtcggcgcgtttctgttcaaggtggcttaccgccgccgcgacaaacgcctgatcttcgccgccaccggcgcctgcgtctatggtttatggctgctgtacgcttccgggctgatgcacctgctgatgtcggtgctgctgtatgcgccgggcctgttggtgttcatgtacgcccgccgcggccatcaggatatcaatctgctgaatcgcctggaaaaaggcagcatcttactgctgctggtggccacgctgcccgccggctggtttatgctgcactaaagtgccccgtcaatgcggctgcccgtcagccgcattttgcttcctcttttcccctgctaccgcgtttcccccctttgtacagtcagccatgcgccacgcttgcgatctcaaatgcaattaattatcattatcatttattggtcaatagtaagacgcgagtgcccctggcgagaggcgtcaggcggcggatgaagacaggctgaaaatggaaggcatttcatggctgagaaactgctgcacgcattacccttgtttgccgcttgggaagcacggatcgctgagggcaacacggcattcaatcagcggcgcgatcgcctggcgatggcgcgctatcaacaggcgctggagggggctcaggcgatcatcgccgagaagccctggctgaatgcggaatataccgccagatttgaagcgctgaatattttcgagtctgcccttgccgcgctgatcgtcacgttcaacaacattacccatctgcgcctgcggcagaagcctcttcgtggcgtcgagctgcatgttcatcaggcccgagtcgctatcgagcaactgttggacgatacgtcgctgtgcgaacagatgcagcagatcgccgaacggcacctgctgcgtttcaggattgaaactctgcacttgctgcgcgaacaccggctgccggaaaccagcgtctgcgcgccggcggccaacgcttccgctaccttgcattaaaagtgacacaccaatctgagggtcatctgtaatgaatgaattgaatgacgagatgaagaagatgctggctaaacagctgcctgtgcaggcgaccagcagcccgaacggcgttcccgatatcggccccaagcgctctttgcgcctctatgatgaccgtacgctgatttacaacgaaaataccggtggccaaacgctgaaaaacatcaaggccggctcgaaaatggccgtggtgatcatcgatcgcgaggcgctggacggttaccgcttcgttggcacgcccgaactgtttctggcgggcaagccgtttgacgatgcgttgacgtttgcggaaaaaaatgggatgaagccgccgaagtacgcggtgttaattcatatagacagtatttataccctgcgctccggcccgaatgccgggacccagctctagacaccggccgtcatgcggcgtgagacatcacgttcatggttaggccatcgcggtaagtcaattgcctaaccatgaacgggcggcctggtcggtacacccggtcagcttttagggggaatggtgatggtcatgcgctcacccaccagggcgatcgcaatgccttcctcgcactctttttgaatggccgccagctgttgtgcttccagcgcatagggcaactgaatatcaaacaccgtcaggccctgctgctgcgccaggtcaatcaggcgcacgatattggtttcatcgctgacctgtgtcgacaccacttgcagcgccagctctttcaactgctctttgcgcgtttgtgacgtggtcacgcgcgatttcaacaccatgccgaagatcggcatcacaccataaatagcatcaacaaagcgccagtgcttcctgcacgatgcggacagaaaatccatatagtcgaaacagattttctcactgcgcgcgatggatgcaaggtgattgctgttcatcccctcattcctctcatggccagtgttaacccgtggtctttcaagccgccgccgggcggcaacctgaaacgcattggggatcttacatccagaaatggataatcatgcgaagctttaacgactttccgccgtatgatggcataattcccctattgtttgccagtctgtccaggagctttaatcaatggaacaccccaactctgccccggtgctgattaccggcggcgcgcggcgcatcgggctggcgctcgccagagcgtttctccagcgcggcgttcccgtcatcatcgcctatcgcagcgaatatccggcgatgaccgagttgaaagccttgggcgccagttgcattcaaggcgatttttccacgcacgaaggtatctaccgtttcgccgaccaggtgcggcaggtggcgcccaaattgcgcgcggtgatccacaacgccagcgcctggcaggccgagtcggcggaagtgccgccggagcaagtgatggcggcgatgctgcaaattcacgtctatacgccctatttgctcaaccaactgctcgaatcttgcctgaccggccagggccaggcgggcgctgacattatccatctgaccgactacgtggtggaaaaaggcagcgacaaacatatcgcctacgccgccagcaaggccgcgctggacaatatgacccgatcgttcgcccgcaagctggcgccggaggtgaaggtcaacgccatcgcgccggcgctgatcatcttcaatccgggcgacgatgaaacctaccgccaacaagcgctggcgaaatcgctgatgaaggtcgcgccgggcgagagcgaagtggtcaatctggtgaactacctgctggagagccgttacgtgaccggccgcacccacggcgtcgacggcgggcggccgctgcgctgaggcaaagatccgcatggcgcatcgctgtaggccgcgctatgctgaaatccgcttttcttattaaaacacgggcatatgcataaaattgtttttgtggaagacgatcctgaagtcggcaagctgatcgccgcctatctgggcaaacacgacatcgaggtgctgatcgaaccgcgcggcgacagcgcgcaggcgcgcattgagcgtgagcaacccgatttggtgctgctggacatcatgctgcccggcaaagacggcatgacgctgtgccgcgatctgcgccctaccttccccggcccgatcgtgctgctcacctcgctcgacagcgacatgaaccatattctgtcgctggagatgggcgccaacgactatatcctgaaaaccacgccgccggcggtgttgctggcccgcctgcgtttgcacctgcgccaacacagccagcagccgaaagaagagtcggttcagccgctcacccagcacaacgcgctgcatttcgggctgttgtgcatcgatccggtcaaccggcaggtcacgctgggcgaagaaacgatcaccctgtccacctcggatttcgatttgttgtgggaattggcgacccacgccggccagatcatggatcgtgaggcgttgctgcaaaacctgcgcggcgtaagctatgacggcatggatcgcagcatcgacgtggcgatctcccgcctgcgccgcaagctgtacgataacgcgctagaaccgttccgcatcaagaccgtgcgcaataaaggctatctgttcgcccctaacgcctgggcatcggtgcaacaatgagaaaacttttcgtccagttcttcctgttgctgttcgtctgttttctggtgatggcgatgctggttggcctggtgtacaaggtgaccgccgagcgcgccggccgccagtcgatggacgatctgatgaaaagttcgctgtacctgatgcgcagcgagctgcgcgaaatcccgttgaaggactggaacaagaccatcgccacgctggatctcaatctgtcgttcaaactgcatatcgaaccgctcggcaaacaggcgctgagcgaggatctgaaaaaacggctgcggctgggggaaatcatcgccctcgacgatcagtacacctttatgcagcgcattccgcgcagccactacgtgttagtggtcggccccattccttatctgttctacctgcaccagatgcgcctgctggatctggtattgctggtgtttatcggcatgtcgctggcgctgccggtgtttctgtggatgcggccgcactggcaagacctgctcaaattggaaaacgccgcccagcggctcggcgccgggcatctggatgagcgcacccacttcgatcccacctccagcctgagccggctcggtgtggcgttcaaccagatggccgacagcgtcaacaccctgatcgccagcaagaaacagctgatcgacggcatcgcgcacgagctgcgaacgccgctggtgcgcctgcgttaccggctcgaaatgagcgataatctgtccgaaagcgagcagcaggcgctgaaccgcgatatcggccagctggagtcgctgatcgacgagctgctgacctatgcccgtttggaccgcccgcaggttgcgttaaacattgaacccatcgatctgccaaaatggcttgaggacaaggtcgctgatatccgtcttattcatcaggaacgtgacatccagctcgatatcccacacgtcggcgacttcggcggcgtcgatctgcgcctgatggagcgcgtgctcgacaacctggtcaacaacgcgctgcgctattccgaacagcgtctgcgcgtcggcctgtggtttgacggcgacctcgcctgcttgcaggtcgaggatgacgggccgggtattccgccggaagagcgtgaacgggtgtttgaacctttcgtccgtctcgaccccagccgcgatcgcgctaccggcggctgcgggttgggactggccatcgtccattccatcgccgtcgcctaccaggggcaggtgttcgtcgaaggcagttcgctcggcggcgccagtttccgtttctgctggccggtaaagccgacattcagtttaaaagccgatctggcataatgccgccagaccttctcattggagccgaataataatgacatctgcacattccaacacgtctgcttacgatcacctgcgcgccctgttcagccggttgtcgcgtttcggccacctgtccgccatcgccggttgggacatgcaaaccatgatgccaccgggcggcagcaaggcgcgctccgaagcgctggccgagctgagcgtgctgcagcaccagattttaacggcacaaagcaccggcgcgctgttggatcgcgcgcagcaagagacgctggacgaactcgaccgcgccaacctgcgcgagatgcgccgccaatatgaagacgccgtgctgctgccggcgtcgctggtcgaggccaagtcgctcgcgggtgcgcgctgcgaacacgcctggcgcgcccagcgcccggccaacgattgggacggcttcgccgacaacctgcgcgaggtggtcaagctcagccgggaagaggcgcagatccgcgcgcaggcggccggcacaagccgttacgatgctctgctcaacctgtatgagccgggcatgcgcagcagcgatctcgaccgcatcttcggcgatctgaaaacctggctgccggatctgctgcagcgcgtggtggccaaacaagctaatgagccctgccaggcgccacaaggcccgttcaatgtggacacccagcgtcagctgagcctgagcgtgatgaaactgctcggtttcaacttcgacaatggccgtgtcgacgtcagcgcccacccgttctgcggcggcgtgccggaagatgtacgcatcactacgcgttacaacgagaaagagtttctgaccgcgctgctcggcatcgtgcacgagaccggccacgcccgctacgagcaaaacctgccgcgcgatctgctcggccagccggtcgccctggcccgttctaccgctatccacgaatcgcagagcctgctgttcgaaatgcagctggcgcgcggcaatgaattcctgaaaatcttgcgtccgttagtcaccgcgcagtttggcgaacagccggcgctggaagagaccaacttcattcgcctcaaccagcgcgttaaaccgggcctgatccgcgtcgacgccgacgaagtgagctatcctgctcacgtcatcctgcgctacgaaattgaaaaagcgctgatcgaaggcgatatcgaagtggaagacattccggcgctgtggaatgagaagatgagtgcttacctcggcctcgacaccatcggcaactaccgcaacggctgcatgcaggatattcactggaccgacggtgccttcggctacttcccgacttacaccctcggcgcgatgtacgccgcgcagctgttccacagcgtgcgtcaggccctgccttcgctgaacgaagatatcgccgccggcaacctgcagccgctgttccactggctgcagcacaacatctggcgccacggcagccgtttcccgaccgagacgctgatcgccaacgcaaccggcgaagcgctcaacccacgctatttccgtcagcatctggaaaaccgctacctgtaatctcccctggcgcggccctgccgcgcccttttcccgcctgcaagaccggataatgtttcataacgcacgttctgtgccgacatcgccttggctacagagtggcgggtggccactcaccattagtatgttgtaactaaaatagcaaaaaacgccggcattccggcctctcatcccagtgcatgacgggcgatcatcgccgccagctgcggcctcaacgaggccggcaggtcatgccccatgcccggcataatatgcaatttggcgttgacgaccgcgcgggcgatcgccactccacccgccttgcgtaccagccgatcgcgatcgccgtgaatgaccagcgtcggcgcggctatgcgccggctgtagcgacgcagatcgccgctgccgagcaacgcggaaagttgccgctgcacgccttcgggatccacgccccgcttcaacaaccgattcaccaatgcatccagctccgcctcctccggcggataaaaccgggtaccgagcgcgcgcaggaaggccttcattccctcgtggcgctgctgcagcgtcaaatcggccgccggccggcgcaccaacagccacagcagcgaaggcgccggcggtggcaacagcggctgattggtgctggagaacaagatgcataacgaggcgacgcgctgcgggtattccgcggccagcacctgggcgatcatcccccccatcgaagcgcccagtacgtgagcctgcgggatgcgtaaatgatcgagcagatgcgccgcgtccatcgccatgtccgccagggtataaggcaccggcgtttgccaaccgagctgggcgcgcagcatcagcagccacaacggctgcgtacgttgcgcctgcgttttgccggaaaggccgacgtcgcggttgtcataacggatcactcgaaacccctgagccaccagggcgcggcagaagtcgtcaggccacagcaacagctgcgcgccgatgcccatgatgagcagcagcggcggatgcgcctcatcgccccagtcctcataggccagcggcacctcgcccagttcggttacgccacaacgaatcactatctcgttcattttaaatcccttttatcgtgcctggcggtcattatagcagcaatcccctcgccgccgtcgccctgtacattaggttacatgccgaaaccaatcactcacggaaagccgggcgccgtttgcctactatcatttcaacggccccgcagtggggttgatacccaaaagtcatgttgaggattctacgatgaaaaaagtattagctctggttgttgccgctgcaatgggtctgtcttccgtggctttcgctgccgaggctgccaccaccgcacctgcggctaccgcaaccaccgccaccgctgcgccggctaaagctcaggtgaaacaccacggcaagaaagcgccggtacagaaagcgcaggcggccaagaagcatcacaaaaaagccgtgaagaaagccccggcgcaaaaagcccaggcggctaaaaagcaccacaagaaaaccagccacaaaaaagcgtaatgacgtgagggtcccctcaccgcttcaggcttgacgtgtacgacacccggttcgccgggtgttttttcatcggggggttctcattgatgctgcgccgctacctgttcgagatcgttctgaccgccctgatcctttgcggactgatcgccgtctttttttacctgtagcctgccgcgttgccggcgggaaattattgaaaaatcaattattgcccatccacatggctgctaaatcagtctatagttagcattcagtgtgtttatggatgatccgtatttgtcaggcaagagatctatgcgcatatccgttttactgttgctgtgctcactcccgctcatcgctactcaggcggcacgcgccgacggtccgtccaaggccgagcaaacgcgtctgtttttcggcaaagatgaacgaatcaaggtcacggataccgccgcccagccgtggcaagccatcggccaggtcgaaaccgccagcggcaatctgtgtaccgccacgctgatctccccgcacctggcgctgaccgccggccactgcgtgctggcgccgcccgggcaactggataaagccatcgctctgcgctttgtggcaggcgataaatcctggcagtatcaaaccggcaatatcgagaccctggtcgacagcaagctgggcaaaaagctgaagccggacggcgatggctggatcgtcccgcccgctgcggccgcttatgattttgcgctgatccggctgaaagacaaaaagccgctgccgatcgcaccgttgccgctgtggcaaggcgacagcaaggcgctgacccaggccctgaaacaggccaaacggctgatcactcaggcgggttacccggaggatcatctggatgacctctacagccaccaaaactgcaaggtcaccggctgggcccagcaaggcgtactgtcgcaccagtgtgataccctgcccggcgacagcggctcaccgctgctgttgaaaaccgccgacggctggcagctgatcgccatccaaagctcggcgccggcggcgaaagatcgctatcgcgccgataaccgcgccctggcggtgcccggcatccgcgaagcgctggacgccctggcggcgggcaactgaccctctcacaacggcgcattatgcgccgttgtgctttttcagcccccttgcatatagcgccgcggtgtggtgccggtgaactggcggaaaaaagcgataaacgcgctgtcgctggaaaatcccaaccgctgtgccaccgcgctgaccgacggcaacgacgccagcagttcgatcgcgcgcatcagccgccactgctggcaccactgctgatagctcaggccggtttcccgctgaaacagccgcgtcagcgttttggcgtgcagatgcaaacgctgcgccaacgccgccaacgccggcaactcgtcgctctccggcagcgtcgccagccaggcggcaagacgcttatcctgcggcagccgcaactgggtattctcgcgctgcgcctcgcccaactcattgatcagcaccgccagcaaatcgcgcgcctggggctgcgccaacgcatagtccagcggccagtgcgcgatgcgctcaacgatcgccgccaacagcgggtttaccgccagcaccgctgcctgtggcggcatggcggccgtcagcgccggatcgaaatacagcgagcgatacgcgacgcggccacgcagctgcacccgatgcgcaatgccgcccggtatccagacgctgcgcgtcggcggcagaatcagccactgctgcgccaacgtgaccgtcatgcatccctgcggcgcatacagcagctgcgaacgctgatgccaatgcagcccggagtcgtgctccaccagttccgccgcgatgccgagagccggtgccggcagccgatccgggtcgaacgggtgatgctgttgaatcagcgccatcagattgtcctatacctattgttttttgtccgaatgattgtaatcgaacaaaatgcgactccctatactgacgccttaacatttagggagaccctgcatcatgcaacgcttatctttaccgctgctcgtcaccgccatcatgacgccgcagatcctggaaacgctgtacagcccggcgctcaccgccatccgcagcgacttcggcatcagcgccgcgcaggccgggcagacgttatccatctatttcttcgccttcgccctcggcgtcgccttttggggagccttctgcgatcggttcggccgccgtccggcgatgctggccggcctggcgctctatctggtcggcgccggcctcgccctgctgagcggcagtttcacgctgttgctggccgcccgtgcgctgatcgccttcggcgccgcggtcggctcaatcgtcacgcaaaccatgctgcgtgatgtctatcaaggcccggcgctggggcgcatgttcgcgctggtcggcatcgcgctctccatcagcccgctgctgggaatgtttgccggcggcgcgctggtcgcctggggcggcagcgcggcgattttcaccgcgcaggcggcctgggcgctggtgctgctgctgtggagttacggcacattgccggaaacgcggccgcggcaaaccgcaacggccgccgcgccgggcattaccctggcgacgatgttgcgcgatcgtcacatctggtgttcggcgctgctggtcgccagcttcaatattatggtgttcagctacttcagcctggcgccgttcatgttcgaaaggctggggttgaacagccaacagtttggctactcgggtgtgatgctggcgctcggcagcctggcgggggcgctgttgaaccgccacctgctggcgcgcggcgtcagcgccaaacgtcagatcctgctgggcggtttgctggcggtggctagcggtatggcattgttcgggtggcaacacagcctgtggatgctgcttccctgtgcgctggtgatgctggcgttcgggttggctatcccgaatgtgctgagccaggcgctgagccgctaccggcagcaactcggcaccgccggcgcgttattcgggttgctgtactatctgttgatcggcctggggctgacgattgcggcgcgcgggcaggatttggccgccacgctgctgctgtgcggcctgttgagcctgtggtgcgccggccgcttgccggccggtgcgcccgagcttaacccgaaagctgctcgatagtttgcaaaatgcgcttgtcggagatcgggtaaggcgtgcccaactgctgcgcgaacaggctgacgcgcagctcttcgatcatccagcgcaccgccttcacctcttcctcctgctgtcgcttcggcggcagcttgttcagccactgctgccacgcctgctgtacctgctccacccgcagcatctgcgcgcgatcccgatgcggatcgatagccagtttttccaaccgccgctcgatcgcctgcaggtagcgcagcgtgtccggcaggcgtttccatccgttgccggtgacaaaaccgcggtagaccaggccgctgagctgggtcttgatatccgacagcgccagcgccaacgacatgtccacccgccccttcagccgtttgttgatgttgaagaccgccgtcaggatctgctcaacctgtttggccacctcgaccaccgtgtcgttcaactcggcgcggatctgctcctgcaggcgcgcaaagccttcctcttgccagaccgggccgccgtgttcggcgatcagcttgtcgatgccgcacgaaatgcagtcgtcgatcagctccagcaccttgccgtacgggttgaaatagagccccagtttggccttgttcggcagcttttcatgcagatatttgatcggcgaaggaatattcagcaacagcaggcggcgtgtgccctgccacatcgcctgttgctgctcgatttcgctgtcgaacaagcggatcgccacgctgtccttttcatctaccagcgccgggtaagccttcatcgaatagccgccgcgcttctgctcgtaaaaggcaggcagttgaccaaagctccagacatgcagattgctctgctccagcccatcgtcggccaccgccgacagcgtctcctgcaccttctctttcagctgcaggcgcaacgcggccaggtctttgccttcgcgcagcgtctggtttttctcgcccaccacgcggaaagtcatcttcaggtgatcgggcacctgatcccactgccaatcatcacgtgacacggtcacgccagtcatgcgccgcagttcacgctccagcgcgtccagcagcggcaactccagcgccgttacgcggccgaggaacgcttcggcgtagttcggcgccggcacaaagttgcgacgcaccggtttcggcagcgacttgatcagcgcgatcaccagctcacggcgaataccggggatctgccactcgaagccctgctcctccacctgattgaggatcggcagcgggatgtgcaccgtcacgccgtcggcgtcggtgcccggttcaaactggtagctcagccgcagcttgagattgccctgatgccagaagttcgggtagtccagcgcgctgatcttgttggcgccgtctttgatcagcatctctttttcgaagttcagcagatccggctgctgcttggcggcattcttccaccagctgtcgaaatgacggccggaaaccacgtcgttggggatgcggcgatcgtagaagccgaacagcgtttcgtcgtccaccagaatgtcgcggcggcgcgatttatgctccagctcttccacttcggcgcgcagcttctggttgtcgcggaagaaggcgtggcgcgtctgccagtccccctccaccagcgcatggcgaataaacagctcacggcacagcaatggatcgatggcgccgtaattgacctggcgcgccgcgacgatcggcaaaccgaacagcgtgaccttttcactggccatcaccgccccttgcgacttcgaccagtgcggctcgctgtagctgtgtttcaccagatgctgagccagcggctcgatccattccggttcgatgcgcgcggcgatgcgcccccacaggcggctggtttccaccagttcggccaccatggtccacttcggcggcttcttgaacaggccggagccggggaagattgagaagcgggcattgcgcgcgccggtgtattcctgcttgtccgcatccttctggccaatgtgcgacaacaagccggtcaacagcgcggtgtgcacgctgcggtagtcggaaggcgtgctgttgatcggcagccccagctctttcaccacctggcgcagctgggtatagatatcctgccactcgcgcacccgcaggtagttgaggaaatcgttgcggcacagccggcggaactggctggaagagttcgccttttgctgctcctgcagataatcccacaggttgacgaacgccaggaaatcggagtctttgtcggcgaagcggcggtgtttttcgtccgaggcctgctgcttgtccatcgggcgctcacgcggatcctgaatcgacagcgcggcggtgatgatcatcacctcgcgcacgctgccgctcttctgcgcttccagcaccatgcgcgccagacgcgggtcaatcggcaactgcgccagctgccggccttgcggcgtcagctgatagtggccgttgtcggcggtggcgatcgcccccagctcttccagcaggcgcacgccatcctgaatgttgcgtttatccggcgcttcgacgaacggaaacgcggcgatgtcgcccagccccagcgaggtcatctgcagaatgaccgacgccaggttggtgcgcagaatttccggatcggtaaacgccggccgcgacaggaagtcctgttcggaatacaagcgaatgcacaccccttccgatacgcggccgcaacgccctttacgctggttggcggaagcctgcgacaccggctcgatcggcaggcgctgcaccttggtgcggaagctgtagcggctgatgcgcgcggtgcccggatcgatgacatacttgatgcccggcaccgtcagcgaggtttccgccacgttggtggccagcacgatgcggcgaccgtggtgcgactggaacacccggttctgctcgctgttcgacaggcgcgcatacagcggcagcacttcagtgtgcggcaaattgaggcggttcagagcgtcggcggtgtcgcggatctcgcgctcgccgctcatgaagatcagaatgtcgcccggcccttcgcgcccaagctcgtccaccgcatcgaaaatcgcctgcagctggtcgcggtcggtgtcgtcgccgtcgtcgaccaccgggcggtaacgcacctccaccgggtaagtgcggccggaaacctcgatgatcggcgcattgttgaaatggcgcgagaagcgctgcggatcgatggtcgccgaggtgatgatcaccttgagatccgggcgcttaggcaacagttcgcgcaggtagccgagaataaagtcgatgttgaggctgcgctcgtgcgcttcatcgatgatcagcgtgtcgtactgcatcagcaggcgatcctgctgaatttccgccagcaagatgccgtcggtcatcagcttgaccagggtgttttccccgacctgatcgttgaagcgcaccttgtaaccgacgctgccgccgagcggggtttccagctcgtcggcgatgcggttggcgacggtgcgcgccgccaggcggcgcggctgggtgtggccgatcagccctttcaccccacgccccagctccagacagatcttcggcaactgggtggttttccccgaaccggtctccccggcgacgatcaccacctggtgatcgcggacagcgtttaaaatgtcctgctttttctgactgaccggcaggctttccggataggtaatgcgcgggcaagacgcggcgcgcgccagcactttttgccgcgccgccgcgatgtcgctttccacttcggcggcaaccgccagctgggcatcgggatttttgatttttcgtgcgccctgcaggcgacgacgtaggcgttgttgatcgcggagcatcagctcgcccagttgggccggcagtgcctcgagcggagatttcacgttcggtgttccttgtttcttcgccgccaagaccaggcttagcaacggtttaatgtttttttagcgatttttttgctttagccgcacagcctatcacaaacggctttttcgccctactttcgcgagcaaaacctcggcatgtcattcaataaaatcgaacgaagatctcgaaatattgcgctatcactgttggaggaatgtgaatagcatgtacttcatgcaagggacgctgagtcctgatgtcactgtcacaacgtaaggaattatcgatgagcaacgtattggttctgaaatcaagcatcctggcgacctactctcagtctaaccaactggccgatttcttcgtagagcaatggagcaacgcccacagcggcgacaccatcaccgtacgcgatctggccgcacagccaatcccggtgctggacggcgaactggttggcgcgctgcgtccttccgatgcgccgttgaccccgcgtcaacaagaagcgctggcgctgtcggacgagctgatcgccgagctgcaggccaatgacgtcatcgtgattgccgcaccgatgtacaacttcaacatcccgacccagctgaaaaactatttcgatctggtggcccgcgccggcgtgaccttccgctacaccgaaaacggtccggaaggcctggtgaaaaacaaacgcgccgtgatcctgaccagccgcggcggcatccataaaggcaccccaaccgacctggtagaaccttacctgcgtctgttcctgggcttcatcggcattaccgacgtggagttcgtcttcgcggaaggcatcgcctacggcccggaagtggccaccaaagcccaggaagacgccaaagcggccctgtctcaggtggttgctgcctaagaccctgcgcaggggcgccgtgcccctgccggacaaaaggcaagtcctgtcaaacctgcactaccctcataataatcatctatccgtatcatttagcgcgccagacggcgcgcttttttttatttcttcaaccattgtccgttgatgccgcgcacatactcgccgctctgcgcacgcgtcaccagcttctgccccgccatgcgcgccacttcgtcgacggcgatatggttgccgtccgccacttcctgatacttctcggcgcggccagcgttgatgcgcttcaccagcgccagcgtttccgcatcctgtttcaccggcgcaatatagccgctcagggtttcgcccacccgcccttgctgcttcgcctcatccagcgtcagcgccatcgccacgctgctgaacagccaggcggcgccggccagccacacataacgttttttcatgtcggctcctagaacagaccgctttgggttttcagcaggttttcgacgtccttatccaccttgatatgaatctcatgctcgatcttgacgttcatattgatggtgatcggatccttcggcgtcgccacctcgatgcgcggcacgcagccgctcagcagcgaaacgcacagcaccgctgccagcgccgacacactcatgattttcattgttgctccccaggttgtgagagggcctgctccagccactcctgtaaattgtcgccgaagcgcaaactgcgccacagctgaaacacgttttcctgatggcgatagttcaggatcacctcgcgtttggcgcttttctgcgggttgataccgtcgatgcgcgcgctcagcgtcagctcgcccaggttatcgagatcgacccgggcgtgcgaacggttgatttccatgtagcgcagccagtcgatcgccgcgccggtcgccaggttattgctgccgatggcgtcggccatgtctttgtccagccgcagcgtcagggtgccggcgttggcgatccagccgttttgcaccagccatttcgggtgattcaggaacagcggcagttcgccgtcgacccggccggacatggcgaactgcttcggtttcagggcggtgaacaacgcgctgagatcgaccttgtccagcttcagcaccgcggcgtcatgctgcggcaaccgcagcgccgacaggctgatatgcccgttgagcatgtccacgccgacgttgctcaacgtcagcggctgcctttcgctataaggataggtgccctgcagatcggcggaaatattctgcatctcgaacaggttggtgaaagacttgatgcgcagcgacaccggctgtttggcccccaattgccactgatgctgcttgaaccggtacgacaggataaaatccaggccgctcatctcgccgtccttcagccacatgccgccgtttttcaccacccagtgaccaccggcctcgaacccctgttcgcgagcggcggaaaacgccgactgcgcgtaaaactcgccgtcgcgcagcgtgagattgagatccggcgccagcagcggttggaacaccttcagcgactgtttcggccaccaggcttcgccgcgcagacgttcgccgtcccaacggccgcgcagcgcgatcggcccaatctgttgcgcctgcagtttgccctgcagctggaaactgtccggcgaacggccgttcacctgcagcgccagcaccggcgccggcagatagccgccgtcgctgaagctgaccttatccgccgccagctgcaactcgccgttgaactgcggactttgttcatcacgccgccagcgcagcggctgattgaggctcaggcgcggcgcggcgaccgtcaccagaccgtacttcaacttatcgaagccggtggagagtttatcgagcaccaactcactgtcgcgccaacggccgctgccggcgacgtcccaggcggcctgcagcggcggcaagcggccattgccccagtaacgccattgccagttgcccttgtccggccagaaatcctgtgcctggccgtccaggtgcagcttgaagcggccccagtaactgtcgctggcgctcaaaatcgcctgcaggcggccggtgatgccggcggcggtcaccttcacgcccgccagcggtaaacgcgcctcttccagcgtcatttccggcgtcaccttgccccacaggcgcagcagcgaaccgggctgcagcaccagcgtcgggttgagaatgctgccgccgatcacacccgggatcgacgcggtagtggaaaagtcggccagattggcctggccggtcagttggaagcgcagatcgctgtcggtcaaccccaccttgcccggcccgagggtgagcaccgcattgcccttgccgttgtgacccgcagtgatcacgttcagccgcgcgctgatctccgtttcatccagccctttgctccaatcgtgcagcgcgatgctgagcccgccgttcaacggctgctcgctgtacggccaacgccactctccctgcttgatgctgacccgctgcggcgagacttcccacggcaacaccgccagcgggcgatcgtcgcctttctcgctcaccgtcaatacgccctgctgctgttgccagcgcatgtccagcaataccggtttttccagataggcggtctgcatttccccctgcaacgcaccctgcgtcggcaggctggccagatccaacgggatggttatcttgccggcgaggtgcagcggttgtgcgctgttgggcggaaccacggtcaggctgtgcaacgtcagctgttgtttttcatccagctgcgcctcggcgctgagattcgggccccgataatgcagacgttgcccgtcggggccggaggagagctgcagcttgccggcatagcgctgccagggaatgagcgtcaggtcattaatggtgagatccagcggcggcagctgttgctgcagctgatcgagcgccagcggcgcactgttggcgtcgccgctcggcagttttgacaaacaggcgctatcgatgctgaccttatcgctcgacagctgccagcggccctggcggtaagccagccgcgtcggcccgacgttggccaacaggcaatcttgcgcagtgaaacgcgcccccgccaacgccaggccgccctggcgccagtgcaatttgccctgcaattccaggcggctccccaccggcaaccaatgcgataacacccccggcagccagcgcggcaaggtttgccacaacgccagcaccaggattgcgcagcccgccaccgtccctatgaatactttcaatcgcctggtcattaaatgattgcttcgttcctgagttaggcattggttaagtctatgcctgaattgacaataatgatggcacgaatttgacatagggtgaagccgagcgggctcgcagaagcgatttgcacctttttggcgcaaacgtgtgcggggttgtagattttcgttacatatacatcacataaacaggacagttttcagacttttgttattgttgttaccgttgatgattaatagtcttgcaaccattctaataaaagtttagctgctagctaactgtgtactagagaagccattccccacacccccgtggggatttttttgccgcctgtcgccaccgtcgtcttccctccatcgtatccagccccaccgcagccttgcagcagcgatttcggccatgtcggaacgggctaaccaattgtcgaatttactaaaatctgttaaattgatcacaaaatcacggtggagaaaccacgatgaaattggcgatatacagtaccaaacagtatgaccgtaaatacctcgaactggtgaatcagcagtttggctatgagctggaattcttcgactttttactcagtaaaaaaaccgccaaaacggccgccggttgcaaggcggtgtgcatcttcgtcaacgacgacggcagccgtgaagtgctcgaagaactggcggcactgggcgtcgaaattctcgccctgcgctgcgccggttttaataacgtcgatctggacgccgccaaagaactgggcatcaaggtggtgcgcgtgccggcctactcgccggaggccgtggcagaacacgcggtcggcatgatgatgtgcctgaaccgccgtattcaccgcgcttatcagcgtacccgcgacgccaacttctcgctggaagggctgatcggttttaacatgcacaatcgcaccgccggcgtgatcggcaccggtaaaatcggcgtggcgacgatgcgcattctgaaaggcttcggcatgaaattgctggcctacgatccgttcccgagcgaacaggcgctggaactgggcgcggagtatgtcgatctgaagacgctgtacgcgcaatccgacgtgatcaccctgcactgcccgctgacgccggagaaccaccacctgctgaatgccgacgccttcgcgatgatgaaaaacggcgtaatggtgatcaacaccagccgcggcgcgctgatcgattccaccgccgccatcgatgcgctgaagcagcaaaaaatcggcgcccttgggatggacgtctacgagaacgaacgcgatctgttctttgaggacaagtctaacgatgtgattcaggacgacgtgttccgccgcctgtcggcctgccacaacgtgctgtttaccggccatcaggctttcctgaccgaagaggcgctgaccagcatttcgcaaaccacgctgcagaacatcagccagttggatcgcggcgaaacctgcccgaaccagttgaacgcctgagcgtaacctcggggcgcccttgcggcgccctgtttatttgagagaacgcgatgagaaaaaccacggtagccgcccttgcggcgctggccttagcggggtgcagcatgaaaccacacacggccgtcacgccaggcgatctgttgcatcacaacttcgtgttgcaaagcgtggatggcgaaacggcaaaatcaccggcgggcggcggcctgctcaatctggagttcggcgagaacctgcatgtctccggcacgatgtgcaaccgctttttcggccaggggcaattacgcgacggcgtgctgacggtgaaatcgctggccaccacgcgcaagctgtgccctgatgagcagcgcaaccgctgggatcgggtgattggcaccgtgctggaaaacggcgccgaagtgacgctaaacgcacagcagctgacgctcaccggcagcggccacacgcttatttataccctgcgcgattgggtgtattgatcctgcaggccaggcgccgtgggcttacccggcgcagctgcccaggcccagcgtgcgttcctcacactgcttgccgttcggcatctggcacatgcgcagcgcttcaccgttcaagttgtgcgcgatggtggtgacgccgccgaccgccgcgcaaccggcgctggtctgcaacgtattgattctggcactgttgccctgctgtactggctcttcgttattgctgctgcaggcggctaaaagcagcacggcgctggcaagcagccattttgatgtcgtcattatcccactcctgaacccggaactgcgctgtgtaaaatcgccattgctgataacgcgcgtcacttggcggacacgtttcgctatctttgatgcaaacttgtttaatctagctcgatatataaataatgaaaatatattccagccattatttgtcgtttttttgcgccggccgaacatttattttgtttgcagaatatttccgtgacggcgccacgcgctgtcaggcgctggccgcacgcaaaaaagtgataacgtcaccgcggccatcgaggaagttttacccgcgacagcggtattaattatcttcgtgtgctttcattgcagcggcgcattttttgctaccggagagaacgatatttgtgtctatgctggcggtgctaagtaattagcattccactattttcagtgaatgatgactgaattcttcaaccggcgcgacttgctgtcacgccggctttttttacatcaaaataacactcagtgcaccgaggctttcgacagtaaattaatcaccagcacgccggcaataattaatcccatgccaacgatcgccggccaatccaatttttgctgataaacgaacaccgcggcgaccgacaccagcacaatccccatgcccgaccaaatcgcatacacgatgcccagcggcatgctcttgaccaccatcgacagcccccaaaacgccacgccgtaacccagcaccaccagcagcgacggccacaggcgggtaaagccctcagaggctttcaacatggtggtggcgatcacttccgcgactatcgccatcgtcaaatacataaatgcgctcatggttttcttctgtcaatttgccgatgcgcaattatgacgcgccggaaataaattgtctttaaacggtgaaaacaatttattgccgccggcccctaatcggcgaggaaatatgcctttgacgatttatcacccgccacacaaacgcgataaagccgcgttcgccccctctgttagacttttttccattactgcgaaagtgcgctttcgcggctttgtgagcaatgaaaaggtaacgccgatgataactacagatggtaataatgcagtcgcttccgtggcctatcgcaccaacgaagtgattgccatctaccctatcacgccaagctccaccatggcggagcaggcggacgcctggtccggcgatggccggcaaaacatctggggcgatattccgcgggtggtggaaatgcagtcggaaggcggcgcgatcgccaccgtgcacggcgccttgcaaaccggcgcgctgtcgacctcgttcacttcatcgcagggtctgctgctgatgatccccacgctgtacaaactggccggcgagctgacgccgttcgtgctgcacgtcgccgcgcgcaccgtggccacgcacgcgctgtccatcttcggcgaccattcagacgtgatggcggtgcgccaaaccggctgcgccatgctgtgtgccggcaacgtgcaggaggcgcaggacttcgcgctgatctcgcagaccgccaccctcaacgcgcgcgtgccgtttatccatttcttcgatggtttccgcacctcgcacgagatcaacaagattgtgcctctcagcgacgatacgctgcggcagatgctgccgcaggcggcgatcgacgctcaccgcagccgggcgctgtcgccggatcatccggtggtgcgcggcacctccgccaacccggacacctatttccagtcgcgcgaagccaccaacccgtggtatgacgccaccggccaacacgtgatcgacgccatggaagccttcgccgccctcaccggccgccgctatcggccgttcgactattacggccacccgcaggccgaacgcgtggtggtggtgatgggttcggccgccggcacctgcgaagaagtgatcgacaccctgctgacccgcggcgagaaagtcggcgtgctgaaggtgcggctgttccggccgttctccgcccagcatctgctcggcgcgctgccggacagcgtgcgcagcgtcgcggtgctcgatcgcaccaaagagccgggcgcgctggccgagccgctgtatctggacgtgatgaccgcgctggcggaagcctacagccggggggagcgcgccacgctgccgcgggtgatcggcggccgctacggcctgtcgtcgaaagagttcggcccggactgcgcgctggcggtgttccgcgagctggccctgccgcagccgcgaccgcgctttaccgtcggcatcttcgatgacgtcaccgggctttcgctgccgttgagcgacgaaatcctgccgcagcgcgcctcgctggaagcgctgttctacggtttgggcagcgacggctcggtctctgccaccaagaacaacatcaaaatcatcggcaacgccacgccgctgtatgcccagggttatttcgtctatgactccaaaaaggccggcggcctgacggtgtcgcacctgcgcgtcagcgagcagccgatcaattcggcctacctggtcagccacgcggacttcgtcggctgccaccagctgcagtttatcgataagtaccaaatggtcgaacgcctgaagcccggcggcaccttcctgctcaataccccttacggcgccgatgaggtctggtcgcgcctgccgcaggaggttcaggcgctgttgcaccaacgccaggcgcgtttctatatcatcaacgccgccaagctggcgcgtgaatgccggctcggcgcgcgcatcaacaccgtaatgcagatggcgttcttccacctgacgcagatcctgccgagcgacgtggcgctgcaacagctgcaggacgccatcgcccgcagctacagcagcaagggccaggagatcgtcgagcgcaactggcaggcgctgggcgccacccgcgccgcgctgaccgagatcccgctgcagccggtcgacgccagcagcccgatgcgcccgccggtggtgtcggacgccgcgccggacttcgtcaaaaccgttaccgccgcgatgctggccgggctgggcgatgcgctgccggtttccgccttcccgccggacggcacctggccggtgggcaccacccagtgggaaaagcgcaacatcgccgaagcgatcccgatctggcagcccgacctgtgcacccagtgcaaccactgcgtcgccgcctgcccgcactccgccattcgcgccaaggtggtgcagccggcggagatggaacacgcccccgcctctctgcagtcgctggatgtcaaagcgcgcgatatgcgcgggcagaaatacgtgctgcaggtagcgccggaagattgcaccggctgtaacctgtgcgtcgaggtctgcccggcgaaagatcgccagaacccggaaatcaaggccatcaatatggcgtcgcgcctcgataatctgacggcggagaaagacaactacgacttcttcctgcagctgccggaaatcgatccggcgcagctggaacgcatcgacattcgcacctcgcagctgatcacgccgctgttcgagtactctggggcctgttccggctgcggcgaaacgccgtacatcaagctgttgacccagctctatggtgaccgcttgctgatcgccaacgccaccggctgttcgtcgatctacggcggcaacctgccgaccacgccgtacaccaccaacgccgaagggcgcgggccggcgtgggccaactcgctgttcgaagacaacgccgaattcggcctgggcttccgcctgacggtcgatcaacatcgcgcgcgagtgctgcgtctgctgaacgcactggcgccgcagctgccggagcaattggtcaacgccctgcagatggaagacgtggcgccggagccgcgccgcaagcagatcgccgaactgcgcacgctgttggcgagtttcgaaggcgaagatgcgcgccagctggcggcggacgccgactacctggtggataaatcgatctggctgatcggcggtgacggctgggcctacgacatcggcttcggcggtttggatcacgtgctcagcctgacggagaacgtcaacgtgctggtgctcgacacccagtgctactccaacaccggcggccagcagtcgaaagccacgccgctgggcgcggtgaccaagttcggcgagcacggcaagcgcaaggcgcgcaaggatctgggcgtcagtatgatgatgtacggccatgtctacgtcgcgcagatttcgctgggggcgcagctcaaccagacggtgaaagcgattcaggaggccgaagcctatccgggcccgtcgctgatcatcgcctacagcccgtgcgaagagcacggctacgatctggcgctcagccacgatcagatgaaacagctgaccgccaccggcttctggccgctgtaccgcttcgatccgcgccgcagcgccgagggcaaggccgcattggcgctggattcgcgcccgccgaacagcagcctggctgaaacactgctgaacgagcagcgtttccgtcgcctgaacgcgcagcagccggaggtggccagcacgctgtatcaggccgccgagaaagagctgaaggagaagtacgatttcctcagcctgctggccggcaaggcggaaaagtccgccgctgagtaacctccctcagggcgcgagcgattcgcgccctgttcttttaccgccgacgtaaatcgcagcaacaaaacctgctggcattccggcgcgcaatccgtaccatacaggcctcgcgtcgggtgcgtggcggctggatgatgaataatgatcaaaatcggccggttgaatggtaaactcgcggtctataacgccatgcccctagtgccccccattgagaatgagcacgatttaaatgtcagaaaagcaatccgttagccaaaaagagcagtacaacctgaacaaattgcaaaagcgcctgcgccgcaacgtgggcgaagcgatcgccgatttcaatatgattgaagaaggcgaccgcatcatggtctgtctgtccggcggcaaagacagctacaccatgctggagatcctgcgcaatttgcagcaaagcgcgccggtcaacttctcgctggtggcggtgaacctcgatcagaaacagcccggcttcccggagcacattctgcccgcctatctggaaagcctgggggtggagtacaagatcgtcgaagaaaacacctacagcatcgttaaagacaagatcccggaagggaaaaccacgtgttcgctgtgttcgcgcctgcgccgcggcattctgtaccgcaccgccaccgaactgggcgccaccaagatcgctctgggccaccaccgcgacgacattctgcagacgctgttcctcaacatgttctacggcggcaagatgaaaggcatgccgcccaagctgatgagcgacgacggcaaacacgtggtcatccgcccgctggcctattgccgcgagaaagacatcgagcgtttctcgatcgccaaagcgttcccgatcattccatgcaatctgtgtggctcgcagcctaatctgcagcgccaggtgatcggcgacatgctgcgcgactgggacaagcgttacccaggccggttggaaaccatgttcagcgccatgcagaacgtggtcccttcgcacctgagcgatatcaacctgttcgatttcaaaggcattcaccacggcagcgcggtggtggacggcggcgatttggccttcgatcgcgaagacatcccgatgcagccggtcggctggcagccggaagactcggacgacgcggcgcctgcgccagagcgtttgaacgtgctggaaatcaaataagccccctcgccgcttgccatcctgcgagcggcgacatttctctttcccgacgatctcgatcctgttcacagtttgcgcaaaatttgctgggcagtgccgtttttaccctatactgtttatttatacagtcatatggagatcgcgcaatgaacatcaccccctgcctgtcccacgtctcgctgggctccaacgatttcgaggccgccgccgccttttacgatcgtgcgctggccgctttgggttgccgacgcgtgctggagcatcccggcgccattggctacggccgcgactacccggagttttggctgcaggtgccgatcgacggccggccggcctcgcccggcaatggcacgcacgtcggttttttcgctaccagtaagcaacaggtggatgaattccatcgccaggcgctgctggccggcgccgtcgatgaaggcgcgcccggttcgcggccgcattacggcgaggcttactacggctgctttgtccgtgatttggatgggcacaagattgaagccagcttctgggatgaaagcgcggcctgaagaagaaggaaatcgaataaaaaaatgccggtgattaaaccggcattgtacgaatcaaatgtgctatgcagtaattcaaaaataagaaagtaagacaattatggagcgcaacgcccatcgcttgacgttgcattcacctgcgagagagatcatgccccatttcccccggctaaatgttgatattgctcaatgttaaccgggttttcgtcatttttgcctacagccagcggctgcgcttcagccaccaagcgacgccaagcaccaatccgaccagcatcaggcaaaatgccgcgaaaccgaaaggattaccgccgcccggaataccgccaaggttgaccccgaacaacccggtcagaaaagtggtgggcagaaataccatcgccaacaatgacatggtgtaagtgcggcggttcatcgcgtcggccatcaccgtggtgatttcgtcggacaagatggcggtgcgcgcgatgctgccgtccagatcgtccaatccccgtcccaggcgatcggcgatatcctgcatgcggcgacgatcgtcatcgctcatccacggcaggcggtcgctggccagccgcgcgaagacgtcgcgctgcggcgccatgtaacggcgcagcacgatcagctgtttacggatcagcgccagctggccgcgctccggcacctgctgctccagcaaggcgtcctccagatcgataatcttgtcgtgcagatcctcgataaattcgctggtgtgatcggtcaacgcatcggaaatttccaccagccagctgccgctgttggtcggcccggcgccgctttgcagatcgttcaccacctgatcgatggaatacaccttgcggtgccgggtggagataatcagcttgtcggtgatatatacgcggatggtgaccagctgatccggccgggaattagcgttaaagttgatgctgcgcagggtgatcatggtgccttcgccctggcggctgacgcgcggccgcgagctttcgccggagagcgcttcacgcaccgagtccggcagcagcggcgtggtactcagccattcagcgctggccgggtgcgcgtaatcaagatgcagccagcaaggcgcgtcgcaggtgatcttgtcatcccgctcgatcggcgtgacgccccccttgccatccagctggtaggcgtaaaccgcatcggcgacctgcagctcgctcccctcaatcacatccattcatttatcccctcagtcttgcttatgttgctgagtctagcgttaacgctttggagatcaaaggccaagctgtaacgccagttttcccgttgtcccataaacgtgatctatacttctgccgcaaggaacgaacggagaaccgcaggagatcgccatgctaaaaacttttctggacatcgtcgtacccaccgtaggcgcctttggcgcgatgtttttcgccctcgtcaaaacgcccttccgcattcggcgggaaaaccacgataagctgctaaacctgctcgaatccgtcgagaagccccaaagcgcccccatacgcctgttgcgctttcgcgactatatcggcaacagcagcgccagcctcgctgcgctgcagctgctgttggcgttaccggacagcgtagcggcgctggaacgctatcgcttcaccggtggccgtcagcaaatcttgcgcgccacgcccgctggcttcgtgttgcggccaagcgccaataacgctttcaaacgtttcctgctttcctgccgctattttttgctgtatttggtgttcgttacgctgctggtgctgttccccgctttgactcaatgggggctgcagcagtttggggtattgattacgccccattcactccgctatctgcctaatgcacgcatcaccgacggctggcagctgctgttccccggcctattatttattatgattatgttcagcctggcattcctgaccttcaggcagttggcacgcgcgggtaacctcagttcggaacgcgccttttatcgctactatcaacgcgcgcgtgaggaacaacgatgccgggaagtcctgagacaaatgcgcacggtgctgcgccgaacctgacgaggctgcgccgtctgcgcggcatcgccatggccaccctgctgctgttcggccaatcggttcgcgcagagccggtgttagaacgtctcgccacgccctaccacgcgccgacggcggcgggttccctgccttattttgtcgctcgcgctcgatccccccagccgcgtaccgcgctggtggtgatgcacgggcatccacgcgacgccgccaagacgttgcaagcggcgatcgatgccgcgcagggagcgggagacaacagcttgctggtcgctccgctgttccaggtgccggtgaaactcgccgcccgctgccattccgccggtctgccccagccgcaagacggtgacgctctctggcgctgcggctcgtggatcgcaggcggtttggataatggcgggaaaaccggctcgttcaacgccatggataacctgctggccgatctgaaacggcgttggccgtcgctgcagtcgatcaccgtggccggtttttccgccggcgcccaattcgtgcagcattatgtcggctttgctcatccgccgagcggagtgcgtctgcgctatgtggtggccgatcccggcagctggctctattttgatcgcctgcgccctctgcccacaagctggggaagctgcggcagtgaaacaacctgtcgcttccgctggcaaacgctggacgccggccagtgtccacaggctaaccagtggaaatatggtccggaagcgcttcccgctcacctgcagcgcactgcagacgcagcccgccggcgctatgcggcggccgatatcacctatctggccgccgccgatgataccggcaccgcgccgggcgcctactatcggatactcgacaaatcctgcgccgcccagctgcagggtccctatcggctggagcgcgccccggcctatgccgactatgaccgacgttatctggcgccggacaaaccgcatcggttaacgatcgtacccggctgtgggcacaacgtcgcctgcgtctttccggctccggcggccaggcacgcgctgtttcccattaatgcaggctaataataacggcaatgaaataaacccttgccgataaatcagacaatatcaccgataaagcgctggtaatgccgttattattatgacttaacatattgctatcaattttaattcaaaatgataataataaatcaacacaaagctgtttcagcgcaaattttaggggcatatacttttctcactacgaggaggtagttatgttacgcgaccatttaaaaataagcgccagcgatacgctggaaaaaatcagcaatattcatttgcaaaaccagggccaggaagagatcagtgagttcgtggtgaaaaacgccgccggcctgcagattggcaaggtctccgtccacgatcgtttcagtacccgccgttcttatcccaccagctaccgcattactcagaccgatatgagcggccgcgtagtggtggacgccatgcgggactgtctgtaagcgtaaccgcgctctgaaatagacaatattaatgtgatgatggcaaccccgtttattattaaacggggtttgtcgcgtggaaaaattaattagcctcgtggtttcgccgccgaaaaaaataacgcccccacattgcgcgggggcgataaataaatcgactcagtgtttgatgatatacatcgtttggctataggccacgtcttccggattggtgatcgggtagccttttacccacggtttgatcaggcggccattggtgtattgatatatcggcgcgatcggcgcctgatcggcaatgatctgttccatcttgttgtaatcggcggtcaccgccgccgggttggtttcccgccccgcctgcgccagcagcttgtcgtagtccgcattcttgaacttggcgatattgccgctgtgggtggaggtcagcagcgacaggaaggtcgacgcctcgttatagtcacccacccaggaggcgcggatcacatcgaaattgccggtattgcggctgtcgatgtaagttttccactcctgattctgcagcttgacgtcaataccgagctttttcttccacatcgaggccacggcgatggcgatcttctggtggctttccgaggtgttatacagcagcgtcagcttcagcgggttgttcgggccgtaaccggccgcctgcagcaacgccttggcctgcgcgtccagctccgcctgcgattgctgttgcagcaagctcgcttccggtttgaacccggcggtcacgtccggcgtaaagtggtaggccggtttttcgccggtgcccaacactttttccgcgataatcttgcgatcgatggcgtaggacaaggcctgacgcacccgcacatcgttggtcggcgcgcgctgggtgttgaacgcgtagtaataggtgccgagctgatccggggtgtacacctgccccggaatgtctttcagcagcttctgatacatatttttcgggaaggattcggtgatgtcgatgtcacccgccaggtaacgcttggtggcgttggattcctggttgatcggcacgaaggtcactttggtcagcacggtgcgcgcatgatcccagtaatggtcgttaggcgtcagcaccagcttctcattcaccacccgctcctgcagtttgaacgcgccgttgcccaccagattgccgaccttggtccagtcgttgccgtatttttccaccaccgccttattcaccgggaacaggctgaaattggccgtcaggctgacgaagtacggcaccggcttatccagctgcaccttgagcgtgtagtcatcgggcgccgacacgcccaagcgatcggccggcagcttgccgctgatgatctgctcggcgttctggatccccgccagttgggcgaaccaggcgaacggcgacaggtttttcggctctaccagccgttgccagctgtagacgaaatccttagcagtgacagggtcaccgtttgaccagcgcgcgtctttacgcagatggaagatataagtctggttgtcgctggtctgccagcgggtggcgacgccggggatcactttgccgttggcgtcctgattgaccagcccttcgaacagatcgcgcgccagctgcgcctccggcaagcccaccgctttgatcggatcgagcgaggccggttcgtctttaatgtggcgcacgatttcctgtttgtccgccagcgcggtgcccgggggaacctgcgccgccatggcgctgctcatacaggcgccgatcgccgccgcgcagagcgccaaacgaaaaccccgttgcattttttttcccgtcattgtgatttgtcccccgttaaccatctgaattttttatcatatagcacaagatccatccggcctagcgctcacggccgagaagttgcaaaaagtgcgattcaggcgataaaaaaacccgtgcggcgcagggcggcacgggcggtgtttgcagcggcgaccgtcagtcgtacaagtggatgctgttgatgcggtagctgaactcttcgccctcttcttcatcgaacacggtgaaaaagcctttctcggccagcggacgtgccgagatatcggttttttgcagctggcgcgcatccgcgtcgtcgtaaccgtagtcgaggtagaaggcatctttctggtaatcgatatgcagggtgaacggatagttcgattcgtccccgcgcccgtcgtcgtttttcaccacgccgaaccattccccctggcggatctggttttcagcgtctacgccgcacagcagcgtgatggtgtcattttcattttcgctatagctggcgatgattctggctactggcatgttaaatcctcttgcgggtgattggcttagctctgccgttagtataacaacagcctcaggccaggtgcggtttaattggcgttttcgccgctaccgcatcacagatcgcgcaaacgccgcacaattgcgatgggaaagaagtctcaaagcgtaatacactgaataaaatgacaatgactctcggcctttaactcagggacaacaccatgaccgaacatcgaccgcgcagtgaacgtggccagttggccatcgcaggagagaactacggcagctcgctgctgggcgcaccgctgctctatttcccggcggcggtcagcggcccgcagaccgggctgatcatcgccggcacccacggcgatgagagcgccgccatcgtaaccctgtcctgcgcgctgcgcagcatcgcccccgaacagttgcgccaccacgtggtgctggcggtcaaccccgacggctgccagctggggctgcgcgccaatgccaacggcgtcgatctgaaccgcaacttcccggccgccaactggcgctccggcgacaccgtctatcgctggaacagcgcggcgccggtgcgcgacgtcaggctctccaccggcgggcgccccggctccgaaccggaaacccaggcgctgtgtcatctgatccatcgcctgaagccgcattgggtggtgtcgttccatgagccgctggcctgcattgaagatcccgccagctcgcggctcggcgtttggctgtcgcacaagttcgagctgccgctggtgaccagcgtcggttatgaaacgcccggctcgttcggcagctggtgcgcggatctgtcgctgccctgcatcaccgccgaattcccgccgatctccgccgatgccgccagcgagcgttacatcgacgcgatgaccgagctgttgacctacccggattaatccctacggggcgagctcgacgatcgccccgcattcgaacgccaggcccggttcagcgtctcgcgccagccaggtcgggccgtccagatcgacgaagcgcgccgccggcgccagcggcaaggcggcggatatcgcccgcgacgtacacaacatgcagccgagcatgatggcgaacccttgttcgcgcgcggcctgcgccagcgccaacgcctcggtcaagccgccggttttgtccagtttgatgttgaccatctggtagcgttgcgccagccgcggcagatcggcccgggtgtggcagctctcatcggcgcagatcggcagcggatggataaagtgctccagtgcggcgtcgtcaccggccggcagcggctgctccagcatcgccacgccaagatcggccagcagctggcagcgcgccgccagcccttccgcctgccaggattcattggcgtcgacgatcagcgtcgcctgcggcaccgcggcgcggatcgccaccagccgctcgctgatatagtgatcgtcgagtttgatcttcagcagcgtggcgccctgcctctccagctcacgcgcggcgaaggccatcgcttccggcgtgccgatgctgacggtctgcgccatgcggatctgcgccggcgccgtcacgccgctgcgctgccacaggctctgcccgtgcagacgacactccagatcccacagcgccgagtccaacgcgttgcgggccgcgcccgccggcatctgcgtcagcagctgctcgcgggtgatgccctgcgcgatcgccggcgccatctcagccagctgcgccatcaccgattcctcgctctcgccatagcgcggatacggcgtgcattcgccgacgccgcgcacgccctgctgttcgatttcgaccaccaccaccctggcttcggtgcggctgccgcgcgcgatcacgaaggcggtgtgcagcggccaggcttccgggtaaaaacgcatgtctctcataacggctcctgagcgaaaactgcgcatccaggcaggctgatgcgccggtgatgttttatagaacagcctaatatatacaactatttagcaaactttgatatccaatccgccccgcttgtcataaactggcgccagggtgtgaacctgatgttaacagccgtcgccggcgcgccgttccatcaggttcatcccctttgtataaacacctgtaaaaggaatctagcaatgactcagacagtacattttcaaggcaatccggtcagcgtagcgggcaaactgccacagcagggcgaacaggccaaggccttctcgctggttgccaaagacctgtcagacgtagcgctgagcagcttcgcgggtaaacgcaaagtcctgaacatcttcccaagcatcgataccggcgtctgcgcgacgtcggtgcgtaaattcaaccagttggccagcggcctggataacaccgtggtgctgtgcatctccgccgatctgccgttcgcgcagtcgcgtttctgcggcgcggaaggcctgagcaacgtggttaccctgtctaccctgcgcggcgccgagttcaagcaggcgtacggcgttgaaatcgccgaaggtccattggcaggcctgaccgcgcgtgcggtcgtggtgctggatggccaggacaacgtgctgtacagcgagctggtgaacgaaatcaccaccgagccggattacgacgcggcgctggcagcgctgaaataacaaagccggcgttcgccggctttggaaacacgctaaaggcgccgcaaggcgcctttcttattcttcgccctcggcgccgcctttacggctgctcaggccatactcgcgcagcttgttggcgatggcggtatgggaaacgcccaggcgcttcgccagcttgcgggtgctgggataggtgcgatacaggcgcgtcagcaccgagcgctcgaaacgcttgctgatgtcgtccagcgagccgtccagcacctcgtcgcccaacgacatctccacctcgaactccggcaacacgatatcctgcggccgcagttcgtagccttcggtttgcgtcagcgcgcggtagatggcgtttttcagctggcgcacgttgcccggccagccgtatttgctgaggaagccgcccagatcgtttgccagcttgggccgcgccacgccctgctcatcggcgaagcgcgccacgaacagctcggtcagcggcatgatgtcctgcggacgttcgcgcagcggcgggatggtgatggtcagcacgttgaggcgataatagaggtcttcgcggaattcgccgcgctgcaccagctcggtcaggttcttctgggtggcgcagatcacgcgcacgtcgacgtgcacctcatgctcttcgccgacccggcggaacgtgccgtcattgagaaaacgcaacagtttggtctgcatgcgcggcgacatttcgccgatctcatccagcagcaccgaaccgccgttggcctgctcgaagaagccctttttgccttccagcgcgttgggataagcgcccggcgcatggccgaacagctcgctctccaccacgtcatccggcagcgcggcgcagttcagcgccaggaacggctgcttgccgcgcgggctgcgcaggtggcaggcgcgggccagaatatccttgccggtgccggtatcgcccacgatcagcagcggcgcatcgagcatcgccagcttgcgcgcctgctccagcacgtgacgcatcttggcgctcaccgcgacgatgtggtcgaattcggtatcgtcgttcaccgacagattttgcagttggcggcccatgcgcgcggtggacttcaacatcaccaccgcgccaaccgcggccggctgttgctgttcgtcctccagatagataggcgtaatgtccatcaggaagtcctggctgcggatcaccacccgttctgagtgcggcgccgtatgctcgctctccagccagcggctgaagttatagccgccgatcagcgccccggcggtctggttgcggatcttgtcttcgctcaggctgaacagcgccagcgccgccgggttggccagctcgaccttgcccttcatatcgatagagaacaccggctccggcatcgactccagcagcgcacgcagcgcgcgatgctcgcgttcggaaggcataaagctgacggtgcgcacgtcggttacgccggcgatgcggcggatctccgccatcaacgcgcggaaagtatcgaagtccagctgggagaaattgaggtaaatgcggccgatgggatcgatctcgatgccacgtaagtcaatgctgcgcgataccaaaagatcgagtaattctcgagtgagaccgaggcggtcttcgcaaaatacttccaaacgcatcagtgttggccttatctctgcaagtgcggggatcgttagcgatgatgatactccctcgcaccgggcggtagaagcgatctgtcagcaaaagttgacagaactctgatttattgccgtggttgctgattttaaacgcaagtgaataacagcatcggcgtcattttagcctgcaaacagagagttatcacaatcataattaatttttcagagatttatcacgcaatcacagggggatcgactgtcgtcaagtctcgattacgtccggcgtcggcaccgctcagaaaacggcgctcctgagagcgccgtcgtggggttatttggccttgccgtcgccctttttcagcgtatctttcaactggccgatcagctggctgcggaaatcgccaagcttcggtttttccccttccagccacggcagcgggcggcacagttccatcgccttgatgcccagccgcgcggtcaacagcccggcgccaatgccctgcgccgcgcgcgccgacagccgcgccgccagatcctgcgacatccagtccatccccacttcgcgcaccagctcggaagcgccggcgaaggcgatattgagcagcaccagccggaacagacgaatgcggctgaagtaacccagttcgatgccgtacagcgcggcgatgcggttaatcaaacggatgttgcgccaggcgataaacgccatatccaccagcgccaacgggctgacggcaatcatcagcgtcgattcggcggcggagcggctgatttcgcgccgcgcctgattgtcgagcaccggctgcaccagtttggcgtacagctccaccacttcacgatcgttttgcgtttcatgcagcgaggcctgccagcgctgcagcgccggatgcccctgatccagcccggcctggcgcgccagcttctcgcagaattcgcgcccttgccccagcccgtggctgtgcaacagctcgcgcgccacgtcgcgctcttccgcgcgctggcgcagccgatacaaacgccgccactcagtgaccaccgaaccgacgccggcaaacacgatcaggccgccggccacgccgccgcccatggcgatccagtcctgctgcacccaggcggtatgcacccactgcacgccctgcgccaccacgctgacgccgaacagcgccagcccggcggtcaccattttgcgccacaggctgcgtttaggtttcagcgcggcgttaatgatgccttcggcgcgcccttcctcctcttcctgctgcagctccggcgccgccggaaagaagctctccgcctgctcggcgtcgaaagcgacgccggcgcgcaacgccggttcctgcggcggctgcagcggctcgtcaaaatcgatacgcggtttgatcggctcgctcatcgcaatttgtctcccaataaaaactccattaccgcatccaggcggatgtgcggcaacggggtgtccacgctcatggcgcgcgggcgaaattcatcgaagtggaacccctggctctgccagaacgccggccccggcaggcgggcgggcacttcgccggggaacaccgtcagcggcgcgccgtcgcagaggcggttgcccttcagcgccgggatacgctgcccctgatgatcgacgatgccgctctcggtcgcctgcaccgaggccaggccgacgcaatccatgctgatgccttcgaacgccgcattctgccacgcctcttgcaccagctgttgcagcaaggacaccagattggcgtgctgatcggcggtgatatggtccgctttggtggcggcgaacatcagtttgtcgatggtcggcgagaacaagcggcgaaacagcgtgcgcttgccgtaatggaagctctgcatcagttgggtcaacgccagacgcatgtcgttgaacgcctgcgggccgctgttgagcggctgcaggcagtcgaccagcacgatttgccgatcgaaacggacgaaatgctctttgtagaagttcttgacgatcgactggcagtagtaattgaagcgagcgcgcaacatgccgatgttggtatgcttgtcggcctgcgccagcttcgactcgccgatcgcggccacgtcaggccacgggaaaaactgcagcgccggcgcgccggccatgtcgcccggcagcacgaaacgccccggctgaatgaagtgcagcccttcacttttgcagcgcagcagataatcggtgtaggcctgggcgatcgccgccaggcggttttcgtcggccggcgccagcggatcgcaggttttgcataggtcaagccagggcttagcccattcggcgcgttcgccctgcagcagcccggtcatctggcgcgaccaggccaggtaatcctgttcgagcatcggcagatccagcaaccattcgccgggataatcgacgatctccaggtacagcgtggaggtgtctttaaagtggcgcagcagcgagtcgttggagcggtagcgcaacgccagacgaatttcgctgacgccgcgcgtcggcgtcggccaggccggcggcgtgccgtacagctgcgccagcccttcgtcataggtgaaacgctggatgccgagatcgcgctgcgggatgcgtttaacgcccaacaggcgttcttcgcgcaccggtgaaaacaacggcatgcgcgcgccgctgtgcacatgcagcagttggttaacgaaagcggtgataaaggcggttttgccgctgcggctcaggccggtcaccgccaggcgcagatggcgatccattccgcggttgaccagcgaggttaactcattttgcagtcgtttcattgctctccttgacgtaacgcccgaatgccttgttcaggcctttacggaacagcggttccagcaccagcgccagcacgaagcgcaccggtttgcggccgacggttttcaacagccagccggcagcgcccgccgggccatagttcaataacgctatgatgatgactttagccaatgtcttcaacattgccgccgctcctcgtttaaatccacccgttctggcggtgttcgcgacatcgattttattcatgacaatgccctccggcacaagacgattaaggttattcacgggataacggcggcgaagatgcccggcctgcgcaggccgggtctcgcaagaagggttacagcttgcggaaacggctctgtacgccgaaggtatcggacgtcacgtagcgctcgacctgacgcagctgctgctcgccgctgcccagctcatactccagctgatcgagcagctggcgcggcgtcttctgatgctcgccttcgaaacggctggccggcgcctcatccaacacgaacaccagcgcgatataggccaccagcgtgaagaagaacagcccaaagaacagcgacagcaccaccatcacgcggatcaggcgcaccggcacgtcgaaatagtgggccaaaccggcgcagacgcctttcaccatgccttcttcgggtacgcgataaagctttttactgcccagcgtattactcatcaggactgtctccagttcgggtgttccgcatcaaggatctcttccagcgcctgaatgcgttcacgcatgcgtttggcgtcttccgccagctgcgccaggcgctgcatttcttgctgactcagctggatgccagtctgttgccgattgctgtaatgcagccaaagccaaatcggcgcgacaaacagcacgaaaattgtcagcggaatggcaagtaataaagcactcattgttattccttcttatcgggtcctggattggcggccacctccggtgtgtggccgcggttcgccttactctgagcggttcatcttggctttcagcgccgccagctgctcactgatggcgtcgtcggctttcagctcggcaaactcctggtccagcgacttctttttaccgatgctgatgctttccgcttcggcttccatgtggtcgatgcggcgttcgaactgttcgaaacgcgccatcgcctcgtccagcttgccgctgtcgagctggcgacgtacttcacgggaagaagacgcggcctgatgacgcagcgccagcgcctgctgccgcgcgcgggtttcggtcagcttgttttccagctcgccgatttcgctcttcatgcgcgccagcgtttcttctacggtcgccacttcctgcgtcagcgtggcgatcaggtcggcaaccttttgtttttcgatcagcgccgcgcgggccaagtcttctttatctttgcgcagcgccagttcggctttttcctgccagtcgcttacctggctttcgccctgctcgatgcgacgcagcaactgctttttctccgccagcgcgcgcgccgacgtagaacggacttcaaccagcgtgtcttccatctcttggatcatcaaccgcaccagcttctgcggatcttccgccttgtccagcagggtgttgatgttggcgttcacgatgtcggcaaaacgagaaaaaatacccataattcacttcctcttggttctgatggcgtctgaagcgccgcgttaagtcgtacagcttgcccaaagagataatcaaaacccgtgccaacttttatgccattgaaaaacaacaactctttatttttgactctctgcgcgcttgctgtagagtgattattttcaccaaacattggcgaatttcatcatgaacgaacagccagaaaatttgttgggcgaagcaaacgcctttgtcgaagtattggagcaagtctcccaggtggcaaagctgaacaaaccggtgctggtgatcggcgaacgcggcaccggcaaagagctgatcgcccatcgtctgcactacctctccaaccgttggcaagggccgttcatctcgctcaactgtgcggcgctgaatgaaaacctgctggactccgagctgttcggccacgaggccggcgcctttaccggcgcgcagaaacgtcatctgggccgcttcgagcgcgccgacggcggcacgctgttcctcgatgagctggcgaccgcgccgatgctggtgcaggagaaattgctgcgggtgatcgaatacggccagttggaacgcgtgggcggcagccagccgctgcgggtggatgtgcgcctggtgtgcgccaccaacgacgatctgccgacgctggcggcggcgggcaagttccgtgccgacctgctggatcggctggcgttcgacgtggtgcagttgccgccgctgcggcaacgccggcccgatatcatgctgctggccgagcacttcgccattcaaatgtgccgcgagctggggctgccgctgtttcccggctttaccgaacgcgccaggcagacgttgctcgagtatggctggccaggcaacgtgcgtgaactgaaaaacgtggtggaacgttcggtctatcgtcacggcgacagcgacaacccgctggatgagatcgtcatcaacccgtttgcaccacgcgaggccacgccgcttgcgcccgcccctgaaggcgtcggcgtgttgccgtcgctgccgctcgagctgaaaaactggcagttggagcaagagaaggcgctgatcgaggcggcgctgcagcaagggcgattcaaccagcgcaaggcggcgcagttgctggggctcacctaccatcagctacgcggtatgctgaaaaagcatgcgctgctgcaaaacggcgaaacggacgaggaatagcgggcaaaaaaaaagccagcacccgagctggcttaaaaaacactggaagcaatgtgagcaatgtcgtgccttccacatcagagccgcaaactgtggccttccgtgaactgccaggcgatgataatagttatcagtatcgtctgtaaagcactttgttgagaatttttctcattaccacacgaagattgcgcaattaccactcagggaatgggtccgccatgtccagccaatagtccacgccggcggccatttcgtcgtcgttcagcaggcagtcgtccagcagacgcacgatcgccgcctgttgcaagtgctggccgataaataccagctcctggcgcatgtcgccgaacggctccacccatttctcctgaatatgcgcccgcgtttgcggatcctgcggccaattatcttgcgggatcgcgcgccaaaaggtgcccgccaggccgtaatgggcgatgccgccagcctggctccactgcccggcctgccgcggccgcgtcgccagccagaagaagcctttcgagcgcagcagcttgccgccgccccaatcgccgttgatcacgcggtagaacttgtccggcgcaaacggccgccgcgcctgatagacaaagctgctgatgccgtagctttccgtttccggcacgtgttcgccgcgcagctctttcagccagccgggcgcctgctgcgccttttcaaagctgaagctgccggtattcagcaccgcctccagcggcagtttgcccggcgcgatcggcacaatgcgggcgtcgggattcaggctggccagcagcgccatcacttcgccctgctgcgttggcgtcaacagatcggtcttgctgaccaggatcacgtcgcaaaattcaatttgctcaatcaacaggtccgccacgctgcgcagatcgtcctcacccaggctttggccggcctcctgcaggctttgcgcctgctggtattgctgaatgaaattcaccccgtcgaccaccgtcaccagcgtatccagccgggcgaattgggacaggctttcgcccgtttcatcctcaaaggtaaaggtttccgccaccggcagcggctccgagatgccactcgattcgatcaacaggtaatcgaaacgcccctcctgcgccagttcgcgcaccgacaccagcaggtcttcgcgcagcgtgcagcagatgcagccgttgctcatctccaccagcttctcttcctggcgatcgagatgcacttcattctccaccagcgcggcgtcaatgttcacttcgctcatgtcgttgacaatcaccgccacgcgcatgccctgccggttgttcaggatatggttcagcaccgtggtcttgccggcgccgagaaagccggaaagcacggtcacgggaagttgtttcatggggacctcattaaaattcattgcgtaatgcctggtaaccgcgcaccagttcgacgttggtggcggccacttcttccgaaaactgcagcgcgccgcgatcgacctggcgatagcgcgacagatcgctgtcggcgcccacgcgttcggtcgaggggatatagcggttttccggcagcgtcacgccgtccaccaccgcgttgtagcgcaccacgcagccggactgaacgtggcagttgaacagcacgctgttgaacccgataaacacccgatcgccgatgcgacacgggccgtgtacgatggcgcggtgggcgatcgagctgtaacggccgatggtgaccgccgccccgctcttggagtggatcaccacgccgtcctgaatattggagtgcgagccgatgacgatcggctccatgtcgccggcggcgttcaactcgtcggcgcggatcaccgcatacgggccgacgtaaacgaaatcttcaacgatcacccggccgcaaataatggcggtgggatcgatgtaggccagcggcgagacctgcggcagatggccgctgggatttttacgcagcatggtgttctccccgccagctcagctccgccaccgcattgtgggcatgcaggctctcctgatgctcgacgcgcagcgagaaggcgcggtagtcgcactggctgcgcagcatgcggtacaggcgccgcgccgcatcctcgcaaaacatcaggttctgaccgttggccagcgcgaaggcctgctcgtcgcggcgtttcaccagcgtttgcactggcgtgcccagcgcatgttcgatgcggtcaatcagttttaccggttcgaacgcccgttcattctcgggcgttacggtgatccaggcccagctgcgctggctgtggggcgtggccggcatgccctgctccaacagccactcgctcacctgccgttggttgacccgctccgcctcctgttcaaaatcaaactggaactgttgctgcgccagctggcggctgagcgccgccgaactcgggcaggtggaggaataaggcacgccgacggtcagcaccagcgtcagcgtgtccgtcagggtggcctcgatgcgcagcggataggctttccagccgcgctgcggcgacagcagcgccgggcgtgacagcaacagctcgccactgatcgacaagctggcgcgatcgctgtgttccggctgcgaagccaaaaaggcctgcaacgtccgaccgatgcgctgtggcgtcagctcgccctgcgtcaactcgtccagcgccagatacagccgcgacatgtgaatgccgcgttcccccgccgcttcggcgcgcaggttgataccggcgtcgaccttcgccatcaatggcttgccggccagctccagcggcagcgcgatcccttgcatcccgacccaatcgagcccgacatcactcatttcgccgcgccatgcctgagcgtccggcagcgaacggcgtggtggaagtgcaacttcgttcatacatccccttgcgttatggtgactttgccggggaacggtaacatgattttgttatattataacataacatgaaaaacttttttcttgccgctgaacgggctgattaatcaagtcgcagaaaactcagcgattttgctcaatggattgggctgctggtcagagtgcgatacactaacgctattgctgattaacccatgagcctctatgcgtggtttacccttttggatactgtcgttatgcctgacgggctctgccctggccgcgacaacaccgcccgcgcccaccgcggcgccgctaccggacattcgccaaagcggctttgtttattgcgtcagcggcatactgaataccttcaacccgcaaatggccagcagcggcctgacggtggataccttggccgcccagctgtacgatcgcctgctggacgtcgatccctacacttatcgcctgatccccgagctggcgcaaagctgggaagtgctggataacggcgccacctaccgcttccatttgcgcaaggacgtgccgttccagaccaccgcctggttcacgcccacccgcaagatgaacgccgacgacgtggtgttcagctttgcgcgcgtattcgatcagaaacacccgtatcacgacgtgaacggcggcgaatacccctatttcgacagcctgcagttcggtgattcggtgcagagcgtgagaaagctcgacgactacacggtggagattcgcctgcagtcgccggacgcctcgttcctgtggcacctggccacccactacgcgccggtgttgtccgccgaatacgccgacacgctgacgcgcgaaggccatcaggagctgatcgatcgcgagccggtcggcagcggcccgttcctgctcaacgaataccgctcggggcaatatattcgcctggcgcgcaacgccgcctactggaaagggctgccgcgcatgccgcaggtagtgatcgacctgggcgccggcggcaccggccgcctctccaagctgctgaccggcgagtgcgacgtgctggcctatccggcggccagccagctgtcgattctgcgcgacgatccgcgcctgcgcctgacgctgcgcccggggatgaacatcgcctatctggcgttcaacacccgtaaaccgccgctcgacaacctcaacgtgcgccaggcgatctcgctggcgatcaacaaccagcggttgatgcagtcgatctattacggcacggcggaaaccgccgcctcgatcctgccgcgcgcctcctgggcctatgacaacgacgcgcacgtcaccgagtacgatccggccaaatctcgcgagatgctgcggcaggccggcgtcagccagctgaacctgaagctgtgggtgccgaccgcctcgcagtcttacaacccgagcccgctgaaaaccgccgaactgatccaggccgatctcggccaggtgggcatcaacgtcaccatcgtgccggtggagggccgcttccaggaagcgcgcctgatggagatgaaccacgatctgaccctgaccggctgggccaccgacagcaacgatccggacagcttcttccggccgctgctgagctgcgcggcaatccgttcgcaaaccaactatgctcactggtgtgatccgggctttgacgaagtgctgcagaacgcgctgctgtcgcagcagctgtctcagcgcatcgacaactaccgcaaggcgcagaaaatcctcgagcagcaactgccggtgctgccgctggcgtcttccttgcgcctgcaggcctatcgttacgacatcaagggattggtgctgagcccgttcggcaacgcctcgttcgccggggtgtaccgtgaatccgcgccggaggtgaaaaagtgattatctttaccctgcgccgcattctgctgctgctgatcacgctgttcttcctgacgctggtcagcttcagcctgagctatttcacgccgcgcgcgccgctgaacggcgccgccctgctggacgcctatcagttctacttcgtcagcctgctgcactgggacttcggcgtctccagcatcaacggccaggcgatcagcgaacagctgcgcgaagtgttcccggccaccatggaactgtgcctgctggccttcgccctggcgctgttcatcggcattccgctgggcatcatcgccggcgtgctgcgcggcaagtggcaggacaccgccatcagcaccttcgcgctgctgggcttttcgatgccggtgttctggctggcgctgctgctgatgctgttcttctcgctgcatctcggctggctgccggtttccggccgtttcgatctgctgtatcaggtgaaacccatcaccggttttgcgctgatcgacgcctggctgtcggactcgccgtaccgcgccgagatgatcggcagcgccctgcgccacatgatcctgccgatcgccgcgctggcggtggcgcccaccaccgaagtggtgcggctgatgcgtatcagcaccgacgacgtgctgagccaaaactacatcaaggccgccgccacccgcggcctgtcgcgcttcaccatcattcgtcgccacgtgttgcacaacgcgctgccgccgatcgtgcccaaactggggctgcagttctccaccatgctcacgctggcgatgatcaccgaagtggtgttcagctggccgggcctcggccggtggctgatcaacgccattcgccaacaggactatgcggcgatctccgccggcgtgatggtggtcggcacgctggtgatcaccattaacgttctggccgacattctgggtgcggcaaccaacccgctgaaacataaggaatggtatgcccttcgataacgtataccgcgagaaaaagatgccgagcccgctgcgctacacctggcggattttctacggcgacgcgctggcgatgatcggtttttacggcgtgatcgccctgctgctgctgtcgctgttcggcagcctgctggcgccctacgcgctggatcagcagttcctcggctatcaactgctgccgccgtcctggtcgcgctacggcaacgtgtcgttcttcctcggcaccgacgatctcgggcgcgacatcctcagccgcctgttgaccggcaccgccgccaccttcggttccgcgctggcggtgacgctggccgcggcgttctgcggcgtgatcctcggcgtgttcgccggcgtcacccacgggctgcgctcggcggtgctcaaccatatcctcgataccctgctgtcgattccgtcgctgctgctggcgatcgtggtggtggcgtttatcggccccaaactcgaacacgccatgctggcggtgtggctggctctgctgccgcgcatggtgcgcaccatctacagcgcggtgcacgacgaactggagaaagagtacgtggtggcggcccggcttgacggcgcttccacgctgcagatcctgtggtacgcggtcatgccgaacatcgcggcggtgctggtgaccgagttcacccgcgcgctgtcgatggccattttggatatcgccgcgctcggcttcctcgatctcggcgcgcagttgccttcgccggaatggggagcgatgctcggcgattcgctcgagctggtgtacgtcgcgccctggacggtgatgctgcccggcgcggccatcctcgtcagcgtgctgctggttaacctgttgggcgacggtatgcgccgcgcaatcaatgccggggtggaataatgccgttactcgatatccgcaatttgacgattgaatttatgactgccgaagggccggtcaaggcggtcgatcgcgtcagcatgacgctgaccgagggcgaggtgcgcggcctggtgggcgaatcgggctccggcaagagcctgatcgccaaagccatctgtggcgtgaccaaagacaactggcgcgtcaccgccgatcgctttcgtttcgacgacatcgatctgctgcagctgagcccgcgcgagcggcgcaggctggtgggccacaacgtctcaatgatcttccaggagccgcagtcctgtctcgacccttccgagagcatcggccgccagctggcgcaggccatcccgggctggacctacaagggccactggtggcagcgcttcaactggcgcaaacgccgcgccatcgagttgctgcaccgcgtcggcatcaaggatcacgacgacatcatgggcagcttcccctacgagctgacggaaggcgagtgccagaaagtgatgatcgccatcgcgctggccaaccaaccgcgcctgctgatcgccgatgagccgaccaacgccatggaaccgaccacgcaggcgcagattttccgcctgttggcgcgtctcaaccagaacaacaacaccaccattctgctgatcagtcacgacctgcagatgatgagcaagtgggccgaccgggtgaacgtcttgtactgcgggcaaacggtggaaagcgcccagtgcgaagaactgctggcggcgccgcaccacccttacacccaggcgctgatccgcgccatgccggacttcggccgctcgctgccgcacaaaagccggttgaatacgctgccgggtgccattccttcgctggaacacctgccgatcggctgccgcctggggccgcgctgcccttacgcgcagaagaagtgcatcgaaacgccgcgcctgcgcccggtcaaaaaccacttcttcgcctgccacttcccgctgaacatggaggagcaataacatggaaacgctgttggaagtgcgcaacctgagcaaaacctaccgctatcgcaccgggctgttccgccgccagcacgtcgaggcggtgaaatcggtcagctttaccctgcgcgaaggccagacgctggcggtgatcggcgagaacggctccggcaaatccacgctggcgaagatgctctccggcatggtagaaccgaccgccggcgaactattgatcgacgatcatccgctggaattcggcgattatcgttaccgcagccagcgcattcgcatgatttttcaggatccgagcacctcgctcaacccgcgccagcgcatcggccagctgctggacgcgccgctgcggctgaacaccgatcttgagcccgccgagcgcgagcagcgtatcaaccagacgctgcgccaggtcggcatgctgccggatcacgcctactactatccgcacatgctggcctccgggcaaaaacagcgcgtcgcgctggcccgtgcgctgatcctgcaaccgaaggtgatcgtcgccgatgaggcgctggcctcgctggacatgtcgatgcgctcgcaaatcatcaacctgatgctggagctgcaggaaaaacacggtatttcctatatctacgtcacccagcacctcggcatgatgaagcatatcagcgaccaggtgctggtgatgcacgaaggggaaatcgtcgaacgcggcagcaccgcggaggtgttggcggcgccgctgcacgaattgaccaagcgccttatcgccagccacttcggcgaggcgctgaccgccgatgcctggcggcgcgacggcggccgcttctgagtcacaccttcacctacaaacccgctgcggcgggttttttatcgccttgcgcgcctgccgcttagcgagaaagcgcacatgcaaattacattcttgttatatatccttatattttattcctttcagttattgattagtccgtaacattattttatctcgccagggcgatcggtgaggatatcccctacgttgcacttctcatacgacaggatatcgcactgatgaacagccttcgccatcgccgccttacgcagctactgctcacgctggcagccggtttttctgtttacggccacgccctctgctgtgatgagctgcgctaaaaccgcctttcgccccgcctgcgggcatgttgcctctttgtccagccgacgctgccgcgcgcagcggcggctgttgatcatgattaaggattgaccctatggaacgactccgtcgacaacataatgcccagtggtatcacgaaacccaaagcagcgtgcggggcgatgcgccgctggaaccgcaggcggccacccttcgcgatcgctttctgctggggctgggcgccttcgccgatgaagccttaaacaatgcgctcagcgctcgcgccggcgtgttcagcgcctcgttggccggctaccacgcgctgtttcccgaccaggtgccgctgtcacgatacgtgacattgtcaccctacgatcgcctcagcaccgcgttgaccgtcgctcaggtgacgggcgtgcaatcgctttgtagccactacgccgctcgcctcgccccgctgcacagcccggacgcctcccgggaaagcaatatccgcctcgctcagatcacccaatatgcccgccagcttgccagccagcccacgttgatttgccgcaaagcgctgcaacagctcgccgacgtcgggctgagcccggcggatatcgtcaccttttcgcaaatcatcggttttgtcagctatcaggcgcgcgtggtcgcgggcgtcgcggcgttggccggccggccggcggtggtggtgcccggcttccctaacgtcgaagacgccgatggcgtcgcgttcagtgccgaagagttaagctggaccgcgcgtctgccgccaatcgacaccgaagccgccgccgccgaacagcttgacgtgctggatcagagccacccgcaggcgcgcgccgaatcttattatctgctgttggcgcacgatgccgccgcactgcgcgagcgtaacggggtgttcaacggcatcaatgccgaaggatatgggttatcgagccgcctgaaggcgctggcgacgctggcggtctcgcgcatcaacggcagccattactgcgcggccaccgtcgcgcaagaattgcaggatgagggattggttcaggcgctgttcgccgggctgcctcagggactggcgtataccgaagactcggtaaaactcgcggtgatgcgcactgccgccgagctgactcgcgcaccggagaagttcaccccgcagagcgtgcagccgttgttcaacagcggcctgaatcaggcgcaggcgctggaagtgatcctcaccgccgcgctctacgcctgggaaaatcgcctgcgccaaacgttgggcgatgcggaaccggcacaaccggcgccgtgatctgtcatcactgagttgacggctagcgtccttcgccgttaactcacccttctctgtttcggcgaaaaacttcaccaaaatataaattgataaagcaaaaatccaaacacacttcatttatcaggattatgattcgttttgttctagcatcggcgaaaaacagggttcgtcaaaattatgtctgcaaacaaagcaataggcagattgcgccatcgctcaattctgtaaccgttctcatcgcataagcagtaaaacaaggttttaaccctgctaattaatagattaactcattagcactcctaacctttcagcagtggtcgtcttgctatttcgtttctatgattaagccgatagcggcgttgtgatgcccccttttaaatattcaacaaagataaacgctcgccgttattcccattattttaattttctatcacagcaaaaaaatattgtgaggtaaccctatgtctgaacaagaacttaaatccagcaacagtatcgttaacgtgattgtcgtcatcgataccgatgccctgatagaagcattcgagaataacaaccccagccaggacgccggcaacccgacgggcattggccatcaatacgcctatatggtcgtcacctccgaacaggtgatcggcggctccggcacggcggacctgaactttaaggccaatgtcggcgatgtcattcgctggaccggcacctcggaatccgccaatttcgacgccagcgtgctgatctacgggctgccgcagttcggcagcggcacccaggttttctccaacccgaccttcaaaatgtatacccgcagctcgatgatgccggcgcaaaataccgtattccccgtcagcttcaccaaccaaacctattggtttatacaggcggacattaccaataccggcacggaaaactattgcatccaatttggcctttattatcggccaaacggcggcgatcagaaattactgggttatttctattgggatccgaccattaccatcagtaattaacatgatttcatcggccgttagagaaaacatgattatggccccgtggggccataatcatgggggaacatcggataaacttaaacgtctctattccttttgccgccgcaaccactcgctggcggcatcgaagaatttttgcgccaacggcgtggcgcgctccgccatatcaaccaccaccgccgcatggcgcggcatggcggcgatggccaccggccgccgctgcagttccggcatcagcggcgattgcaactggccgcgcgggaacaacccgcagcccaagccgacgaaaatgccctcgagcagctggaagatcgaggcagtctccagccgcgtgtgcagcgtcaacccggcgtcgcggaaatgctgatcgagatagcggcggaaataccgcgtcggctcggccaggcacagcggcaaggcggccaccgcctccagcggcaacggcgtgtcgcccaccagcttagggaagtgttgcggatgaaataccagctctacgccggtttccaccagcgattgtgattgaaaatgcagttccttcagcgtcgacagctcgaaaaagccgatgccgatgtcgacggtatgcgccgtcaacgcctccagcaattgatcggcgctcagcaccgccagccggtaatcaagatggggataacgctcgctgaccgccttgagcatttccgccaccgagatgctgcactgcggcaccacgccaaggcgcaacgtaccgtgcaaaccgtgcttgagcgactccacctccagcttcagcccttggtaaaccgagacgatctcacgcgcccacgccagcacccgctcgccttcggcggtaaaaccgccgaaatggttgccgcggttaatcagcgaaacgcccagctctttttccaggtttttcaatcgcatggacagcgtcggctggctgacgaagctggcctccgccgcccggccgaagtggcgttcccgttctaaattacacaaataaatcagttgtttaatatccatagcgcggctcaatgatcggcattcgcgctcagtataccaccgggcgtcgtcgctcgcccggtgagtcagagcttcagcttcatgtaatccatcaggcgtgagaacacgccgccctgcggcaccgcctgcagcgccaccagcggcagggttttcaccacctggccattatcgctgatgcggatctcgccaacggtttgtcctttgttgaccggcgcttccagccgcgcagcattgatcacatactgcgccttcagtttgtccgcctcgcttttcggcaggctgagcgactggtcctgcgcactgccgaccggcaagcggtggctttcgccgtaccagaccggttcttcccccaggctctggccggcgctgaacaggtgcaccgtggtaaagtcgcgcagcccccacgtcaacagcttacgcgcctgttcctcgcggcctttggaacttttgccgcccatcaccacggcgatcaggcggcgatctccttcggtggcggaggcgatgatgttgaagccggccgaggcggtgtgcccggttttcaggccgtcgacgtgcagagtcttatcccacagcaggccgttgcggttctgctgcgtgatgccgttccacgtcagcgatttctcgctgtacatgtggtattccgccggctcgctcatgatgatggcgcgcgcgatcaccgccagatcgccggcggtggtgaactgccctggcgcatccagcccgtgcaccgtctcaaaatgggtgttctgcaatcccagttgggcgctcttctcgttcatcagcttgacgaagttggcctggctgcccgccacatagtccgccatcgccacgcaggcgtcgttgccggaatcgatgatgatgccgcggctgagatcgcgcaccgtgaccctgtcaccaggcttcaggaacatcagcgaggagcctttgaacaccgggttgccctgcgcccaggcgtccttgcccaccgtaacaacatcatcgaggccaatcttatgctcatcgagcgcatgatcgatcaccaacccggtcatgagtttggtcaggctggccggattgcggcgctcgtcggcattgccggcagccagcacctggccggtagtgtaatccatcaatacgtaagaggcggcgtctatcgccggtggggtcatggtgggaaaatgggacgccgtttccgccgcctgcgcagctaaaggcagtaagataccgccgatcaccactgatactgaacgcttcacgctgtgttcctcaggcccgcaggctaaataaaatgccaatataatccgcgagatagactgcattaattcactttcaggcgaaaccattactcttttgcagcgggtgtctttatgcaaccatttgtttaggtcagcgtccgcctgcgatagatatgctctatgccgccattgccccattcgattagacgcctgcctgccgcccccctaaacttgtgacataaatacgcaagacgcataaaaaagcgtttactttttagctacaaccacctgcgaagtgtcaccatgaaattcaaaccgtcaatcaagccttataccggcccagcgggcggctggggttcgcttgaagccaccacccgctttgtcctcgacagtaaacaaaccctaaaaaacatgcgcaacctgatgcgcgtcaacaaggcgcgcggcttcgactgccccggttgcgcctggggcgacgataaccacagcaccttcagcttctgcgaaaacggcgccaaggcggtcagttgggaagcgacgcgcagcgccgtcgagcctgagttcttcgccgcccacagcgtcagcaccctgcagcagcagagcgactatttcctcgagtatcaggggcgcctcacccatccgatgcgttacaacgccgaaaccgaccactatgagcctatccattggccggacgcgctggcgctgatcgccaaacacatcaacggcatggacaacccgaaccagatcgagctgtatacctcgggccgcgccagcaacgaagcgtcgtacctttatcagctgtttggccgcatgctcggcaccagcaacttccccgactgttccaatatgtgccacgaggcgagcggcgttgggctgaaacagagcatcggcgtcggcaaaggcaccatccgcatcgatgacttcgaaaaggccgatgccatcttcgtgttcggtcaaaaccccggcaccaaccacccgcgcatgctgcacagcctgaaaaacgccgcccgacgcggcgcgcgcatcgtcagctttaacaccctgcgcgagcgtgggctggaaagattcgccgatccgcaggatccggtgcagatgctcacgccaaaatcctcgccgatcagctcttcctattaccagccgaatctgggcggcgatatggcggcggtgcgcggcatggtgaaagcgctgctggaaacccaccgtcagcgcctcgccgccggtgaaccagccttgtttgacctgacgtttatcgaacggcacagcgtcggcgtggaggcttatctggcgcaggtggacgccaccgagtggcagaccatcaccgcgcaatcgggcctgagcgaagcgcaattgcgccaggcggcggccacctaccaaggtgctgaacgggtgatctgcacctgggcgatgggcgtgactcagcataagcactctattgcgacggtgcgtgaaatcaccaacctgcagctgctgttcgggcaactgggcaaaccgggcgccggtctgtgcccggtacgcggccacagcaacgtccagggcaaccgcaccatggggatcgatgagaagtcgccgaaggcgctgctcgacagcctggaacgccactttaacttcaccgccaatcgcgcgctgggccacaacacggtggaagcgatcgaagcgatgctgcgcggcgaagtgaaagtgctgatcgcgctgggcggcaatctggccgccgcggcgccggacaccgagcgcaccgcccgcgccctgcgcaactgcgatttgacggtgcacatcagcaccaaacttaaccgcagccacctggtgaccggcaaagacgcgctgatcctgccgacgctgggccgcaccgaactggacatgcaggccagcggctcacagtacatcacggtcgaggattcgttcagcatggtgcacgcctcggaaggcatcggcaaaccgctggcggatactcaacgttcggagacggcgatcgtctgcggcatcgccgacgccgtgctgggtacgcagcagctggactggctggaactggccgatgactactcgctgatccgcgatcacatcgccgccaccattcccggcttcgaggatttcaaccggcgctgcgagcagcccggcggtttctacctgggcaatgccgccgccgaactgcgtttcgccacgccgagcggcaaggcggaattcagcgacgccgcgctgccgactaccctgttcccgcagctgggcggcgagcaagcgccgtttaccctgcagacgctgcgctcgcacgatcagtacaacaccaccatctatggtctggatgaccgctaccgcggcgtttacggtcagcgcgaagtgctgttcatccatccggaagatctggcggcgctgggcctgcaggatggcgaacgggtagagatagaaaccctgtggaacgacggcgtggtgcgtaaggtagatggattcaagctggtgagttacgacatcccgcgtggcaatctggcggcctactaccctgaaaccaacccgctggtgccgctggcaagcttcggcgacggtaccggcaccccgacctcgaagtcgattccggtggcaattcgccgcagcgagcagcaaccgtcgctgcgcatcgcctgaaaacgcgcgcccggttcacgccgggcgcgccaatatttccaggatagtctgcaattcctcggacagctgatgccgccgccagacgaaatagagatcgctcacgccctcctcgcccatttccaccaccttcagccccggcgccggcaagatcagcggcagcaacgaacccggcacgcaggcgacaccgcaaccggcctgcacgcaggctgccatcgcggcataagattccatttccagcgtcatgcgcggttttagcccgcgcgaggccagccagtgatcgaccttcagccggaacgagcactcgcggctgaacgtgtaaaactccagcggcgccagcgtggcggcgtcgggctgcccgacatccgccggcatcagcagcaccagccgttcgtcaaacgccttttggctggccagcagcggatgttcaattgggccgtcggtaatcgccagatcgagatcgctgtcgatcagcatgcgttccagcaccagcgagtcgcggctcagcacgttgatgtgcaaatgaggctgtaaacggcgcagccgggcaatgcgcgccggcaagtgactgaccagcgaaaaatccagcgcgccgaggtttaacagcccatgctgttgctcgccggcgaacagctgcttgctgcgctcggcctgcgccacgatgtcgcgcgcctgctgatagaacagtcgtcctttgggattgacgtacagccggttcttgtcgcggaaaaacagctcgccgcccagcgactcctccagctcgcgcagccgcagcgtgacgttggaaggcacgcagtgcagctcgcgggcggcggcggcaatggttttgtgttccaccacggtgcagaaaaacttcagctgactcagcttcattaatcattcacttttagttagtgttttagttaaaaacaatcactttagattagcatcgatttcatctacagtctgccgacaccctgaggaggatctctgatgccactgaatgatttattgacgctgcccggcgtggcggcccaaccggacgcggtaaccgacggttacgtgttcaaccacaccatgatccgcgtgaaagacctgaccaaagcgctggatttctatacccgcgtactgggctttacccctgtctatctggaaacgttcgaagaagccgctttcaccatctgctacctgacgcgcagcccgcgcgagcagatcccgcaggatgacgacgaacgcaaacgctgggcgctgagccaaccgggcattctcgaactaacccataaccacggcaccgaaaatcaggcggatttccactaccacaacggcaacggcgagccgcgcggctttggccacctgtgcgtcacggtgccggacgtgcgcgccgcctgtgagcggtttgaacgcctcggcgtcaccttccagaaacgcctgcacgaaggccgcatgaactacgtggcgttcattcgcgatccggacgattactggattgaaatcctgcagccgacgccgctgcgggactgattgccccctccttcaccccggccctcgcgccggggtttttcatctatcgcacttcgattgaccattcttgcgcaaaatcgcgcggcaatgcggggttccgtgacgttaggcttgctcgcagcgggtgattcgcgtaaaactgtcagccgcaaatcttgccactcacaacccattcactggacgatatgtttcaagataacccgctgctggcgcagcttaaacagcaacttcactctcagaccccgcgcgttgaaggcgtcgtgaaagggactgagaaaggctttggctttcttgaagtagacggtcaaaaaagctacttcattccaccgccgtacatgaagaaagtcatgcacggggatcgcattatcgccaccctgcacaccgagaaagagcgcgaaatcgccgagccggaaaccctggtcgagccgttcctgtcgcgctttgtcggccgcgtgcaaaagcgcgacgatcgtctgtccatcgtgcccgatcatccgttgctgaaagaggcgattccgtgccgcccggtgcgtgaactgacccacaacttccaggccggcgactgggcggtggcggaaatgcgtcgtcacccgctgaaaggcgatcgcggcttcaacgccgacctgacccagtttatcaccgacggtgaagaccatttcgccccgtggtgggtgacgctggcgcgtcacaacctggaaaaagaggcgccggagatgcaggcgctcagcgagccgaacgcggcgctggtgcgtgaagatctgaccgcgctcgaattcgtcaccatcgacagcgccagcaccgaggacatggatgatgcgctgtacgtgaccgacaacgctgacggttcgctgcagttgaccatcgccatcgccgatccgaccgcctacgtcgaacaaggcagcaaactggacgatattgcccgcgtgcgcgccttcaccaactatctgccgggcttcaacatcccgatgctgccgcgcgatctgtcggacaacctgtgctcactgcgccctaatgagcgccgccaggtgctggcttgccgcgtgaccatcgccgccgacggcgcgctgggtgacgatattcagttcttcgccgccgagatcgaatccaaagccaaactggtgtacgacgaagtctccgactggctggacggcattgccggctggcaaccgccgagcgacgccatcgcgcaacagatcaccctgctgaaacgcgtttgcgacgcgcgcaacgcctggcgccaccagcatgcgctggtattcaaagatcgcccggactaccgcttcgtgttgggtgaaaaaggcgacgtgctggagatcgtcaccgagcagcgccgcagcgccaaccgtatcgttgaagagtgcatgatcgccgccaacgtctgcgccgccatcgtgctgcgcgatcgtttgggcttcggcgtgtacaacgtgcacaccggtttcgatcccgcgctggttgagcaagcggtcaccgtattgcaggctaacggcgtggaagccgaagccgaaaaactgctgacccttgagggcttctgcgaactgcgccgccatctggatgcgcagccgacccagttcctcgacagccgcatccgccgcttccagaccttcgccgagatcagcactacgccggggccacacttcggtctggggctggaggcttacgccacctggacatcgccgatccgtaaatacggcgatatggtcaaccatcgcctgctgaaggcgatcatcaaccagcaatcggccgaaaaaccgcaggatgacgtgacggtgcagctggcggaacgccgccgcctgaaccgcatggcggaacgcgacgtcggcgactggctgtacgcccgcttcctgcaggacaaggccggtaccgatacccgcttcaacgccgagattatcgacgtgacacgcggcggcctgcgcgtgcgcctgctggacaacggcgcggttgccttcatcccggcgccgttcattcacgcggtgcgtgacgagatgcagtgcagccaggaaaccggcaccgtgcagatcaaaggcgaagtggtttaccgccagagcgataccttgcaggtcaccatcgccgaagtgcgcatggaaacccgcagcgtgatcgcccgccctgtggcctgaacgccaacctgaaacggtcgtaacgcaaaacgccggcggtgagaaccgccggcgtttttttcgccccgcgtctgctagcgcagcggatcgccgccggtttcacgcaacagcggcagcgcggccagcgagatcagcgtcgccaacatcagatagccggcgggcgccagcagcgaaccgctgagtgcgatcgactgtgaagcgatgtattgggcaaagccgccgaagattgcgacgccaaggctataaaccaacgcaaaccccagcgcgcgtacgcgctgcggaaacagctcggaaatcaccaacagcgtaggaacagaccccaacgtcgttagcccaaccatcagcgcaaccacgctcagcaacaccgccggatacggcgccaccgtcagcaaccagaaaaccggcaacgccagcagcaaaatggcgatccgcgcccagcggatcagcggcagacggccatagcgatcgcaccagcccccaaccagcaaactgccgccgaaagtgatgatcccggccagcagcatcgcggcatagccgtaagtctgcgccatgcccagatacttcaccgcaaaggtaccgagataatacatagaaatgtacgtggcaaccgtggcgccgatggtcaacatcacgccgagcaccaccgctcgcgagtgccggcgcagctgcgcaggcggctcctgagtgcgcgacatcggcggacggtcgctttccagcccgaggcgcagccagcaaccgagcggagcaagcgccacgccgataaagaaaggaatgcgccacccccattcagccatcgcgttcggttcgcccgaaagcagcggcagcgcggcgctcaaccccagcgctgtcacaccgccaatcacgctggcgataccctgcgtcgccagtgaccagctggaatagaagccgcgccgattaggcggcgccgactccaccagcaacgacatcgacgcccccacctctccacccgccgccacaccctggataaggcgcgccgccaccagcgtgatggttccccaatagccggcgctggcgtaggtcggcgcaaaaccgatcatcgccgtacccaggctcatcaacgaaatcgtcaggatcatcgccggtttgcggccgcggcgatcggcataggcgccgatcaaaataccgcccagaggccgcataataaaactgacgccgaacgtggcgaacgccagcagcaacgccagattaggatcgctcgacggcggaaagaacagcacactaatataaatgacgaagaagttataaatgccgaagtcgaaaaattccagtgcattaccgaaggaggcggcaaatatcactttcttgccacccgtcttcgacggcgcatttatttctgattgcgtcaccgccgtattttcactcattattatcttccctgttattatttttctgacttattttaaataggcttccaccagcgcgccccaataatggctgcccgccgccaggcattcatcgttaaagtcatatcccgggttatgcaccatacagcttccttcaccgtcgccattaccgatcagcagataacaaccctgcggctgcgcctcgagcatgaaggtgaaatcttcactgcccatcagcggcttggcgccgtagtgcgcgcgcgcggcgccgaactgctgctgcgccacctgatgcgcgaagcgcgtcatggcctcatcgttaaccaataccggagcgccgttgatgtggttcacgattgccgtggcaccgaagctttgcgcctgcgcctgaatcagcgcaggaatgcgcgttaacagctcggttcgccactcgcgccccagcgatcgcacgctaagccgcatttccgcgctgtccgggataacattggccgcctcaccggccttaatgctgccgacggtgatcaccgccgcctccagcggatcggtattacgcgagacgatgctttgcagcgcgacgacgatatgcgaggccaccagcaccggatcgacggtcagatgcggcatagcgccgtgcccaccgcagccttgcacggtaacgacgaattggtccgtcgaagccataaaggcgccgtgacggaagaaaaactcgcccaccggcagacccggcatgttgtgcatggcgaagatggcgtcacagggaaagcgttcgaataacccttgctccaccatcaacgcgccgccgcccagcgtctcttccgccggctgaaaaatcagatgcagcgtgccattgaagcggcgggtttgcgccaggtaacgcgcagcgccgagcaacatggtggtatggccgtcgtggccgcaaccgtgcatgcggttgggcacgctgctgctccaggatttgccgttgttttcttcgatcggcagcgcatccatatcggcgcgcagcccgaggcttttcacgccgtcacccacccgcagcgtaccgacgacgccggtgcccgccaatccgcggtgcacctcatacccccacgaactcagataatccgccaccaaatcgctggtacgaaactcctcgaagccaagctccgggtgctgatgaatatcatgacgaatggccgttagctgcggtaaataacctgcaatgactttatctatcattattaattccttttattgactttattatttgtgaaataaatgaatggcgcttcgagcgcgagccaagatatatcacgcaaaacgtttattagtaccccttgtgtcggcaatacagaaaaataatgccaaagggatcgcgcaagcgatgggtttagatattattcgccagataaaaattaaaaatgcagcaggaaacgctgccgggccacattgcgacgacagcctgcaccaatggggtttcatcacgttgtttttccaccaaaaccccacctgcttcacatttctcatccgacctgccgcggttcggcggcaaaacttctactgttaaaacgtcatccctaataacaacgtcaatttctacctctgtacgccaaggagttgtttcatgaaaaacatcaggtccggacttatctggctgctggtggcgttggtcggcgctttcgccttcgccatgctggcgctcagccgcggcgaacacgtcaacgccgtctggctggtggtcgctgccgtcgcctgctacagcatcgcctaccgcttctacagccggttcatcgccgacaaggtctttgaactggatgaccgccgtcttaccccggccgaacgccacaacgacggcctggactacgtgcccaccaacaaatgggtgctgttcggccaccacttcgccgccatcgccggcgccgggccgctggtggggccgatcctggccgcgcagatgggcttcctgccggggaccatctggatcctggtcggcgttatgttggccggcgcggtgcaggattttctggtgctgttcatctccacccgccgcgacggacgttcgctgggggagatggccaagcaagagctgggggcgttcgccggggtgattaccatgctcggcgcgctgggggtgatgatcatcatcctgtcggcgctggcgctggtggtggtgaaggcgctggccgacagcccgtgggggctgttcactatcgccgccaccatcccgatcgcgctgttcatgggcatctacatgcgctttatccggccgggcaaaatcgctgaaatctcagtgatcggcttcgtgctgatgctgctggcgatcgtttacggcggcaacgtggcgcaagatccctactgggggccgttcttcacgctgcacggcaccaccctgacctgggtgctggtgatctacggcttcgtcgcctcggtgctgccggtgtggctgctgctggcgccgcgcgactacctttcgacctttatgaagatcggcgtcatcatcggtctggccatcggcatcgtcttcgccatgccggagatgaaaatgccggcggtttcgcgctttatcgacggcagcggcccggtgttcgccggcgccctgttcccattcctgttcatcaccatcgcctgcggcgccatttccggcttccacgcgttggtttccagcggcaccacgcccaaactggtggagcgcgaaagccacattcgctttatcggttacggcgccatgctgatggagtctttcgtcgccatcatggcgctgatctgcgcctcggtgctggatccgggcgtttacttcgccatgaactcgccggcggcgctgatcggcaccacggtggaaaatgcttcgcaggtgattaacagctggggctttatcgtcacaccggaaacgctggcgctgatcgccaaagaggtaggtgagaactccattctgtcgcgcgccggcggcgccccgaccttcgccgtgggtatggcgcacatcatcagcgaggtgttcaacagccgggcgatgatggcgttctggtatcacttcgccattctgttcgaagcgctgttcatcctgaccgccgtcgacgccggtacccgcgcctgccgctttatggtgcaggatctggtgggcgtggcggtgccgcagctggccaacaaccgctcctggttcggaaacctggcgggcaccacggtggcggtggccggctggggcttcttcgtgtatcagggggtggtcgatccgctcggcggcatcaataccctgtggccactgttcggcatcggcaaccagatgctggcgtcgatggcgctgatcctcggcaccgtggtgctgttcaagatgaaaaagcagcgctacgcctgggtcaccattctgccgaccgcctggctgttcgtgacctccatgaccgccggctggcagaagatcttccatgagaaaccgagcatcggtttcctggcgcaggcgaagaaattctctaccggcatcgagcaaggcacgatcattgcgccggccaagtcgctgaaggacatggagaccatcgtgttcagcaaccagatcaacgccgcgctgtgcgggttctttatgctggtggcggtgaccatgctgatcgccgccttcttcgcgatccgccgggcgctgcgttccgaacaaccgacggcgcacgaggtcagcgccgcgcttagggaagaggccagccgcagctaaacgaaccgagcatcaagcaagggcgccgcggcgcccttttttactggctttagcctaacagcgtcgagccgaacgccccctgccaatcctgttcgaatttctcgaccgcggcctgcaccgccggcgcgttcaggaactgctccgcgacgtccaccggcagcgtgatggcctgacagcccgcgagcaagcactccagcgcctggcgcggcgttttgaagctggcggccagcacctgcgccgacggcgcatgcaggctcaacagctgctgcagctcgtgcaccatttcgatgccgtcgccgccctgcgcgtccacgcggttgacataaggcgccacatattccgccccggccaatgccgccaacagcccttgcccggcgccgtacactgcggtgcccagcgtcggaatggacatcgttttaagcttcttgatcgccgccaacccttcggcggtcgccgggatcttcactaccagccccggtacccgctggctgagcagcgccgcctccgccaccatacgttccgcatcggccgccatcacctgcgcaaacagcttgccggtaccgccgagggcgtcgcgcagcgcgggcagcacttcccagatcggcttgccttccttcgccacgatgctcgggttggtggtgacgccgtgcagcggcagaatgcgcgccaggcgttttaccgcggtcacatcggcggtatcgagataaagctccatcacggactcctgtgtcatgttctgtgggcggattcaaactctgatcatcatagggcaaaaaaaccgccaacctttgatcaaaatcaattcgactttcattcgaaacacctttaatggcgaaagattcagcaacgccaaacgggtgactcatgttctttaatctgcagcgctactcgacccatgacggccccggcatccgcagcgtggtctttttaaaaggctgcccgctgagctgccgctggtgtcagaacccggaaagccgttcgcgccacgcagacctgctgtttgacgagcgcctgtgcctgagcggctgcacgctgtgcgccgcgcgctgcccacaaggcctgcaacgtgacgaggaggcattgacgctgcggcgtgaagtcatcagcgcagacgactacgcagccctggccgccacctgcccgaccggcgcgctcagcctgtgcggcagctcggtcaaccccgacgatatcatggccgaggtgatgcgggataagcctttctacctgcgcagcggcggcggtttaacgctgtccggcggcgagccctttatgcagccggagatcgcggcggaactgctgcggcgcggccgcgaggccggcatccacaccgccgtcgagtcctgtctgcacgtgccgtggcgttacatcgcgccttcattgccgtggctggatctgctgctggccgatctcaaacacaccgacgaagcgcgcttcagagcctggaccggcggctccgcccgccgggtgatgaacaatttccgccggctggcggcgcacggcgtgccaatgaccgtgcgcgtgccgctgatccccgatttcaacgccgatcgccgctctgtccgcgcgatcgtcgacttcaccgccgacgagatcggcgtgtcggagatccactttctgccgtaccacacgctgggcatcaacaagtaccacctgctcggcgagccctaccgtgccgcccgcacgccgctggacgcgcccgctctgctggccttcgccgaagactatgccggcgccaaaggcctgaccgccattttgcgaggataacgccatgaccacgttggatttgaccaccctcagcgcccgcattcaggcgcacaagaacgcgctgattcacatcgtcaaaccgccggtgtgcaccgaacgcgcgcagcactataccgaagcctatcaacagcatcaggacaggccgctgccggtgcgccgcgcgctggcgctggccaaccacctggcgaaacgcagcatctggatcgccaacgacgagttgatcgtcggcaaccaggccagcgaactgcgcgccgcgccgatcttcccggaatacaccgtcggctggatagaaaacgaaatagaccagttggccgaccggccgggcgccggtttttcggtcagcgaagagaacaaggcgattttgcatcgtctgtgcccctggtggcgcggccaaacggtgcaggatcgctgctacggcatgttcaccgacgagcaaaaggcgctgctggccaccggcatcatcaaggccgagggcaacatgacctccggcgatgctcacctggcggtcaacttcccgctgttgctggagctaggtctcgacggcctgcgtgaaaaagtgaacgcgcgccgcagccgcctgcgcctgaccgagtgggaagatctgcacaaagcgcagtttctcaacgctatcgacatcgtgctggcggcgctgagcgaacacatcctgcgcttcgcccgcctggcgcgcgacatggcgcaaaacgaaccgcgcactggccggcgcaccgagctgctggccatcgcggataactgtgaacagatcgcccatcgcccgccgcacaccttctggcaggcgctgcagctgtgctatttcatccagctgacgttgcagatcgaatccaacggccattcggtttccttcggccgcctcgatcaatacctctatccctggtatcggcgtgacgtggagctggagcaaaagctggcgcgggaagacgccatcgagctgttgcacagctgctggctaaagctgctggaggtcaacaagatccgctccggctcgcattccaaggcttccgccggcagcccgctgtaccagaacgtcaccatcggcggacagaagctggtcgacggccggccgtgcgatgcggtcaacccgctgtcctacgccattctcgagtcctgtggccgcctgcgctccacccagcccaacctcagcgtgcgttaccatgccgggatgagcgccgacttcctcgacgcctgcgtgcaggtgatccgctgcggtttcggcatgccggcattcaacaacgacgaaatcgtcattcccgaattcatcaaactgggggttgagccgcaagacgcctacgactacgccgccatcggctgcatcgagaccgccgtcggcggcaaatggggctatcgctgcaccggcatgagcttcatcaacttcgcccgcgtgctgctggcggcgctggaacagggccgcgacgcgacctccgggcagatcttcctgccgcaggaacaggcgctatccaaaggaaacttcgccgatttcgagcaggtcttagccgcctgggatcggcaaatccgctactacacgcgcaagtcgatcgagatcgaatgcgtggtggacagcgtgctggaagaaaatgcccacgatatcctctgttccgcgctggtggatgactgcatcgagcgcggtaaaagcatcaagcaaggcggcgccaaatacgattgggtttccggcctgcaggtcggcatcgccaacctgggcaacagcctcgcggcggtgcgcaaactggtgtttgaccagggggcgatcggccagcagcagttggcgacggcgctggccgaagacttcgccgggctggatggcgagcagctgcgccagcggctgctcaacgccgcgcccaaatacggcaacgacgtggacgaggtcgatcggctgctggtgcgcgcctaccaaacctatatcgaagaactgaagcagtatcgcaacacccgcttcggccgcgggccgatcggcggcggttactacgccggcacctcgtcgatctcggccaacgtgcccttcggcgccgccactctggccacgcccgatggacgtaaggcgcacacgccactggcggaaggcgccagtccggcgtccggtaccgatcacctggggccgacggcggtgttcaattcgctcgccaagttgccgaccgaggcgatcctcggcggcgtgctgctcaatcaaaagctgaacccggcgacgctggacaacccgcgcgaccgggaaaagctgatgctgatgttgcgcaccttcttcgagagctaccgcggctggcatgtgcagtacaacatcgtgtcgcgcgaaacgctgctggcggcgaagcaacaccctgaccaatatcgtgatttagtggttcgcgtagctggctattccgccttctttaccgcattatcccctgaggcgcaggatgatattattgcgcgcacagaacatactctttaaacctttgactcttagcggccgcgccttggcggccgcatcatcaggccgatatgaatttacgacaacagaccatattgcagttggttaacgatcgccggcggatcagcgtcaatgagctggcgcgcgcctcgggcgtctcggaagtcactatccggcaggatctcaacctgctggaaaagcgcagttatctgaagcgggtgcacggttccgccgtggcgttggagagcgacgacgtcgacgcccgcatgatgtccaatttcaccctcaagcagcggctggcgcaatacgccgccgcgcaggtcaacgacggcgagacgatctttatcgagagcggcagcgccaacgccctgctggcgcgctacatcgccgaacgcaagcgcattacgctgatcaccgtcagccactacatcgccaacctgctgaaagaaaccgactgcgacgtgattgtgctgggcggcatgtaccagaagaaaagcgagaccgtggtcggcccgctgacgcggctgtgcattcagcaggtgcatttcaataaggcgtttatcggcattgacggctttcaggccgaaaccggctttaccggccgcgacatgatgcgcgccgatgtggtcagcgcggtactggccaagggcgtggagaatatcgtgctgacggactccagcaaattcggccagatccagcccaatccgctggcgcagccggggcaaatcagccgggtgatcaccgattcacgtttggcgctggagtatcagcatcagctgaaacgccagggcgtacaggtggagctggtcaacgaataacgcgccgcgcgggccacgccgcccgccgtttcccttgcgcagcgggattttaagactatttacctgtttatccttcccgagaaacctatactcagcttcggtaacttttgggccgtaacccgctaattattcggccgttaacaaaaaatgccattttttatatcgataccgtatgggaatcaacagcaggcctgatttatggttaacgcctatacttataaggcacttccatatagccaatgctaaggagaagtcattatgatgattatcaataaacgtttcgccaccgccgctctggctctgactctggcgttttcactgagcgcctgttccaacatgtccaaacgcgatcgcaacaccgccatcggcgccggcgccggtgcagtcggcggcgcagtgctgaccaacggcagcgctttgggcacgctgggtggggcagcggtgggcggcatcatcggtcaccaggttggcaaataacctgcccgatgttcctccgccgacaggcgggcaaaagcgacttggcgctttgacgtattaaccaataacgatgatttcaggtctgttttacgttaagtctatggttctttcgccgttaacgggttaacccccggcagcaacaacctctagccatgccgcagcattgcaccgcggcatggcgattcacctcaaccgcccgccagtttgaccttcatgcctttggcttccagcagctgtttgagcagatcgcgtttatcgccctggatctcgatgaccccgtctttcaccgagccgccgcagccgcatttctttttcagctcggccgccagtttatcgagcgcggcatcatccagatcgacgccggtaatcaggcacacgcccttccccttgcggccgctggtctggcgctggatgcgcacaacgccatcgcccttggcgcgttgcggtttaacctcttcctgcttgatgcgaccggtgtccgtggaatacaccagacgactgttatcgtcattcatcatcgcttcctcaggccaaagaggcgcggatcgcgcgcagcgtcgcggccggatcggcagattgggtgatcggacgcccaatcaccatatagtccacgccggcggcctgcgcctgcaccggcgtcatgatacggcgctgatcgcccgccgcgctgccttcagggcggatccccggcgtaaccagttggaaagcctgcccgcaggccgccttaagccgctgcgcttcgtgtgccgaacacaccacgccgtccagcccgcagtcgcgggtcaggcgcgccaggcgctcggcgtgctccgccgggctggcctcgatgccgatgccgcgcaggtcttccgcttccatgctggtcagcacggttacggcgatcaacagcggcgcatccgtcccgaatgacgccagcgcttctttagcggcagtcatcatgcgcgcgccgccgctggcgtggacgttaaccatccaaacgcccagttcggccgccgccgctaccgcatgcgcagtggtattgggaatatcgtggaatttcaggtcgagaaacacgtcgaaaccgcgcccatgcagatcgcgcaccagctgcggcccaaacagcgtgaacatttctttgcccactttcagccggcagtcttgcggatcgatacggtcggcgaacgccagcgcagcgttcttatcggcgtaatctaacgccacaacgattggagatgattttaagtcattgttattagcgttattttcagacttcatttcttctaccttttgtaaaatggagataatcagggactcacccgcgaaactgaccgccgcattctacatgtcgggggcccgaaatcccagccgcagcgcgcacctacgctctgtcatgttacctcccgcctttgtcatggcgcgtcaatgaacgcccgtcagcaataaaccacgcagcgtaaaacgccgtaaagatgcgtaaattgttaatcagatattttgaatgacttgctcagcattatcagattttcaatcggcacggatgctttattattcaccacatcggaagcgaacggcttccttcctaaataaacagactggagtcacccatgaaaaccatcaaatattttgcagccgcagccgctatcgcactgacctctttcgccaccttcgccgctgaaccgatcagcagccagcaggccgataacctgaccgccaccggcatcgtttccgcaggccacgcgaccaccctcagcagcctggagaaaaagctggccgctaaagcggatgcccagggcgccagcagctaccgcatcatctccgccggcggtaacaacatgctgagcggcaccgcgatcatctacaaataatgtttccggtacagggcccgcatgctcgggccctgcctctgtttcccgcctaaaaaacccgcatttgtcccgcctccgtttgttacataaatattaaatttttattacacactagacacccgatcgccagtggcttagcttgaaggcatcttcctgcagaaaggctttcaaaatgagcgagatatcgacacttaccattaaaattcctctggaactgaaggaaaaaatccgcgccgccgccgctgaaaacgaattttcgttgagcgtggaagtgtgccagcgcctggaaagcagtttcagcgcgcccgccaccaaagcagagaaaccggccaaaaaggcggatgagctgcaccacggcgaaatcgacaatcaaagcaccgaagaagagattgaacagccgctgagccagaaagagctgaagaaactgcgtcagctgttgaaaaccggcgccaaaggcggcaagaaaaagtaagtgatgaacataaaaaaacggggcgattttcgccccgttttttttgccgctccgccgcgttattgcccgtccagaccgcgtatcggtttgaccgatgaccaggcgcggcacgacgggcaatgccaatagagcgagtgcgcggtgaagccacatttgtggcagcggtaacgcggtttggtgcgaatttgctcgccgaccatatcgcgcaacagcagcagactctctttcgcacggccgtcttcagcgtccgccaggtgataatccatcagccgataaaacacccgcatagtgggatgacgctgcagctgacggttgatatagacctgcaccacgtcgcgcccttcgtgctgctcgatgatctcggctagcatcagatcggcagtggcgccggtgttctcttccacgcagcgcttaagaaaatcggcccagttgtgctgttgttccggcagatgcgtgtagcattcctgcagcatcggcagcgtttcgctgaccaactctttatcctggctcagtacgcgttgcagcgactctgccgctttggcgtagtcgttttgcgccatgtagatgcgcccgaacatgatggacacgcgcgcacactgtttatcggcggcgtccgcgcgcttgagcaggctcattgcccgatcgagatcgtcgctgcccattgcctgcagcgccaactcacagtaaaagtgcgcgatctcgacgcgttgcttctctttgcccagcttgaccagtttttccgccacgtcgatcgctttctgccagtcgctggtcgcctgatggatcaccagcagttgctgcagcgccgagacgcgaaaatccgcttcgtcagtcaactggctgaacatgtcttccgcgcggtcgtacagcccggccgccatatagtcgcggcccagctgctgcaccgccagcaggcgctgttcgaaggtcagggaggcgctttccatcaaggcctgatggatgcggatggcgcggtcgacttcaccgcgcgaacggaacaggttacccagcgtcaggtgggcttcaacggtgttgctgtcctctttcaacatgtcgaggaacagatcgaccgccttgtcctgctggttggagagcagaaagttcacccctgccacgtattcgcgcgacaggcggttggcttcttgctgtttatcctgctgagcgcttctgcgccccatgtaccaaccgtacgcggcagccacgggcagcaacagaaacagcagttctaacatagaggattattccttgctgacaacaggctgagccgccggttcagcgggctgctcaagctgcagctccagccttttgatcttgcgctcggcgcgacccagcgcaatacgcgtgcgcaggtagaacaggccgcaaatgatccagccgagaacgaaaccggcaccaaacagcgtggccaacagggtcgatacgcgatagtcgccctgcgcaaccagatagttaaaattgaccacctgatcgttatgcgcacccaaggtgacggaaatcacgaagatcaccagaaccaacaaaaaaatcagcaaatatttcacattctttcccgcgatgccgagtgaatcggatgaacgatgccaaaatgtggcgtccctaacccttaagttagcatttcccgctgcggcagggaaaccctgccgcacgataaaaccacatatctgctggcatattcggcagtaaacggtcttagcgaacaaattgatgagaaagcttctcaaaacgtcgaatttataaggatatgggggcaaccgggcgaattgcaatggcgggaaaatgtaagcggttaatgcggcaccgatccgatgccgcctattttgtgacatggtcacgtcatgacatgattaaccctccatctacattgatggtttggccggtgatatagtcggcatcgtctgaggcaaggaaggtcaccagacccgccacatcttcgggttgaccggcacgcttgagcgggatgcctgccacccactcggccatcaactcccctttgccgtaagttttttccgggccgctgagaatttctccccaaacgcggtcgttatattcccacatctcgctttcaatgatgccggggcagaatgcattgacggtgatgccatgtggcgccagctcaagcgctaaactctgcgtaatgccgatcacccccattttgctggcggcgtaatgcggtgtgtaaatgaacccgttacgtccttggccagaagacgtgttgatcaaccgcccacggcgttggccgaccatatatttggccgcctcccggcagcagagccagaccgccgtggtatttaccgccaacactttctcaaaatcgcttttgggcatctggtcaaaacgatcgatagtgatcaccccggcgttctgaatggaaacgtcgatcgcaccaaatcgctcccagacctgacgataaaaatcaaccacctgtgtttcatcggtgacgtcgaggatgaccgacagcacccccgcccgataacgctggcgcagcgtttccgccgtggtcaggatgcgatccgcattcgacgcgatcgccaaattggcgcccaaactggcgaaacgctcggcgataccggccccaatgccgcggcatgcgccggtaatcaccacggttttccccgtgaagtcacgattcatgattgttctcctgtcatcaatgaggccgtctgcggccgccacaaggtgcgctgtaccgcctgccgccacgcgctgtagttttcctgcaactgccggtggcgctgcatatcgggtttaaactcatcatgttgaggcaacagtgccgccagttgccgatcggtagctccccacaggctgcgcatcgccatcaaagccgcccccagggccgacagttccgccgtgttgctgcgccacaccgggcaacccagcagatcggcctgaaactgcatcagccagtcattgcggctggggccgccgtcagccatcagcccctgcagcgcaaaactcggttgttgccgcagtacgccgatcacatcggcgatttgataagccaccgattcaaaagcggcccgcaccaaatgttctcgccgcgtgccgcggctgagcccgcaaatcacgccgcgcgcctgctcatcccaccagggtgcgccggcaccggtcagcgccggtacaaaatagacgccaccgctgtcgggcacgcgaacgggcagttcactcaacggcgcttcaccctccgacggtatggcggcgatatccagcatccaggcaatagcgtcgccggtgtggggaatattgccctccagtgcgtactgcatgcgtccaccgtcatgccaggcgatggtcgttgccagagcgctcgtgtcgcattgcgctttgacgattggcgccattaccgatgagccggtgccataggtggctttaacctgcccagcctgacccagcgcatgaccataaagcgccgcatgtgaatcccccaccatcgcagcaattggaatgccgtcggcaatgccttccaatcccaacgtcgtgccgaacagatggctggaaggatggatcgtcggcagcgcctgacggggaatattgaacagcgccagcatctgctcgtcccactccccggatgcgagattcagcagttgagttcgggcggcattggaaacatcacagccgaatgcccgccccccgctcaactgccacagcagccaagcatcgatggtgcccaggcacagctcgccgttctccgccaaccgttgtccctcttcgcagtgatcgagcaaccagcgcattttcgacgccgagaacaacggtgaaagcggcaaaccggtggcgcggcgcaccgcttcctcctgccgatcgcgccgcagccgttcgcagaaatcggtggaacgcgcgcattgccaggtcagagccgggccgatcggttggccgtcagcgcgacgccagccgatggcggtttcacgctggttgctgatggcgataccggcaatgcgggatgcgccggccaacgcaatagcctcccgcaataccgccagagaggccgccagcaaggtctcgctccgttgctccacccaaccgggctgcggcgtctgcaacgtcagtggcctgctggccctggcgacgatcgtaccctgcgcatccaccaccacggccttggcgttgctggtgccctcgtccaacgcgacaatgcaatccgctttaaccatggctcacctcagccagcggctgcaccgcttttttttcctggcgctgcatcagaataaccttgctctgcaaacgctgctggaactggtcaatcaccacggcggtgacgatcaccagccctttaatcaccatttgccagaactcgctgacgcccatcatcaccaagccgtccgccagaaaaacgatcacaaaggcgccgatgatcgaaccgaataccctgccgcgaccaccgctgagcgccgtaccgcccagcaccgtcgcgccgatggcgtccatttcgaacatattgccggtcatcgggtgcgcggtttgcaattgagaagcgatgaccagccccaccagcgccgcacacagcccggaaaacgcatagacgaacattttcactttgacaatcggcacccccgacagccgcgccgccggctcattgccgccaatcgcatagatataacgacccagcggcgttttcttggtgagatagatccccaacaacacgatggccaacatcagccaaatcgggttgtaaatccccagaaaggtgccggatcccagggccgcgaaaccggtgttgcccagcgcttccaggcccaccagattgggataggttttgccgtccgccgtcagcaacgccgccccacgcgccacgtacattgcacccagggtgcaaatgaacggcgcaacgccgagccgtgtaatcagcgtgccgttgatcaaacccaacagcacgcccaacaacgccaccgcgccgatcacttcaaagacgttgagaaacagccgattgccatcccacagcgggataccgacggtcaacagcgcaccggcaaccatcccgcacaaccccgccaccgcgccgaccgacaagtcgatgccgccggtaaggatcaccagcgtcatgccaaccgccagcagcccggtaatcgctacgtgttgcgtcatgatcagcaaattggagacggtcagaaaattcggcaccatgctgctgaagaacagcaccaccagcaacagggcgataaaggtacgcgcctgcagcaaatacatatacaaccgatacttggtttgcattgccttatccttatgcatgaggggttgaggcgcggatcagcgtttcacgatcggcccgttcgcgcggcagatcggccgtcaactgcccgtccgccatcaccatcacccggtcggccagtgagaccacctcatccagctccgacgaagagaacatcaccgccaatccctgacgcgccatcgcgccaatcaggtggtaaacgtccgttttggcaccgacgtcgattccgcgcgtcggctcatcgagaaacaccacctgcggcccggtcagcagcgccttgcccaacaccactttctgctgattgccgccgctcagactggtgattggcagctcccggtcactcaccttgatcgccagtttttcgatcatgccatcgaccaacgcgcactccccggccgacgccaacggccgtagcgcattacgccccaggctggccagggtcatgttggccttaatcgacatcatctgcaccagcccctccgcctgcctgtcttccggcaccagcgccatgcccaacgccatgcgttgacgaaaacccaaccgttccacgcttttgccgttgagcaaaatgcggcctgcagtctggcgcatcacgccgttgagcactttgaacagttcggtacggccggcacccaacaggccataaatgccgatcacttcccctttgcgcagtgaaaaactgacgtcgttaaggcaatagccgccgttttcacgcggcagcgtcagctgttcgaccttcagcacttcatccccttgctctgccgcgcaataatcaaagtgcttgctcttttcccccaccatcttttcgatgatccacggaatgctgacgttactgaccggctcggcggcaacaaaacgcccgtcgcgaaacaccgtgatgcgatcgccaatctccatcagctcttccagtcggtgagaaatgtagatgagggtgacgccgcgttttttcagatcggcgatcacccgaaacagcgtgcgcacttcggcctgactcagcgccgacgtcggctcatccatgatcagcacccgggtgtccttcgccagggcacgggcaatttcaaccagttgctgatgaccgataccgaggctgcccaatggcgtatgtgggtcgatatccaattccagccgctgcagcaaggacttggccagctgatactgatagtcgacattgatgcggccgcgctggaagaactcgttggccataaaaatgttgtccatgaccgacatgttggggaacaggttcagctcctgaaaaataatgctgatcccgagccgctccgcctgctgcgtggaggttaacgtcaccgctttcccctccagctcgatggtgccggaggacggggtttccacccccgccaacagcttcatcatggtcgacttgccggcgccgttttcaccaatcagtacgttgacctggttgcgaaacacttgatagctcacgctatccaacgcggtgacgcccggatagagacgcgaaacgttgcgcgtttgaataatgatcggatcgctcatcacgcccccttaaggttgaatgcgcaccggcgtgatcaacagcggctcggcgggcgcctgccagctgctgaatacgccatacacggtaatgtggtcacccaccttgggctgggatccggccagttcgtcgatcgaagcctggttaatcgccctggcaaaatcgccgaacagcgcttggtcattgaaatcgctatagctcaggccgcgatagctgtcgcgtaacgctgtcccgcggtagaccggcccgatctgcacctccacgctgctgagcggcgcatcggtcagtttgagcgttaattttccgctgcgtgaacgggtattgaccgccgcgacttcaccgctgaccttaacgttgaagtaacaaggaaactccggttgagcacggtacccaagcaggccgcaagcgctgttaaaatccttggcctggtcgatccgggcgatcagctcgcccagcggctgcgccgttttgaccgcttgcggggcgatttgactgcggtaaatctccaccgcctgcgccacatgcgcattcaccggggagcgaagctccgccagctttttctccgagacgatacggcaaccgctcaacgccaggacgacgatgacggtcaacgcaatacgcatcgacataacaacacctccgatcgccccccgccgccaggacggggtggtgaaagacgccgctcagcgcggattacggtttaaagttgaagtcattgactcgctgcgcattgtctttgccgatcaggatgccgcggaacatcacgcgttccttgccggtgtagctgccggattggaagtagccatccaggatctcgacgccctgcgcggcaatcgcctgcgcctgcagcatcacgctggcgtagaggctgccgttgagaatggcatcgcgctcatcgttgctgccgtcgatccccaccacggtgacatcctttctgccggcggccttcagcgccgccactgcgcccagcgcgaccggaccattgccacagatcacgcctttgatgtccggatgcgcctgcaggatgctgtccataatgcgtttcccctccagcagattacccttggcgtcttggcgcgccacgctgaccatctccgggtattggtcaatcacgttatggaacgattgcgaacgcgtaacgcagttattgtccgccagattgcaggtcagttcggcgtatttaccggtctcccccattttttccacaaactggttggcgacgtccgagccggcctggaagttgttatgggtgatctgtgccaacgccacgccatcgaccgggatctcgcggttgatcagcaccaccggaataccggcgtttttcgcctgctgcacggcggcgacgctggcctgggaatcggcgttatccaaaatgatgccctgaaccttgcggccgataaccaggctgatgagctccccctggcgcttgacgtcttcaccgtgcgacagcaccagcgtctggtagccgagagacttggctttggcctcggcccccttggcttccgcggagtaataaggattgtccaacgagttgacgaggatggcgatcgtgcccttttccgccgccatggcagaggtgcaggcaaaaccggtgagcagggtaaggtaagtggctatttttctcatgatggtgttctcttatcgttgtgttgaacatcgtctggtgttggcgatcgctgcggttgccgcttaccaaatggtaaaaccgccgtcgatcatcagatccgcgccggtgatcatgtcgctgccgttgctggcaaaaaacaggatcgccgctgcgatttcatcggtataggcaaagcgccccagcgggatcagctttttcatcgcctcgcccttctcgccgcgccaggctttctctcccataggcgtcagcactacggtgggcgataaggtgttgacggtgatgccgtgtggcgcccactctttggccatcaccttggtcatgcccagcagccccgccttggcagaggtataggcacagtgatcgtcaatggcgatagaggccgcctgcgacgcgatgttgatgattttcccgccgtggccggcggttatcgcgcggcgcgccaattcttgcgagcacaggaaaggcccggtgaggttgaccgccagatggcgctgccactcctcgagcgtgacctctgtagccggctgcaaattaacgtagccggcgcagttgaccaggatatcgagccggccaaagcgccgctcagccgcgttgaaggcggcaactaccgagtcggggtcggtcacgtcacacacctgacagaacacctgttcttcgcccaactctcgtagcgccaccgcggccttgtcctgttcaaagagcgggtacatcaacaccaggcgcgcgcccttttccaacagcaggcgattggcggccatcgcgatgccgcccaaaccgccggtgattaccgcaaccttccctgccagcgacatccggctatcgacaccgtagcgtaaattaacgtcgtattcgttccgctccatcgcattccccctattgcgttaactgagcatgcaatcctgccgcgtcgatggcatattgccgccgcagcgccgcccggctgctgctgtgggtaaattcgtaagccggcacgcccagcgcggtaaacggccgcggcagctgatgccgcagcaacagttcaccgatgatggtgcctaaaccgccgctgagcgcatgctcctccatagtcagcacccgacggtgcgagcgcatcaacgccaccaccgcctcctcattgagcggccagagcgaagggagagagacaatggtcgggttatcgcccaatgccagtaccttcatcgcctcatgagccaccgtgcccaaacagaacaccaggctatcttccccttggtgcaacacctccggctctccgggacggaattggtaatccgcgttcaataccggcagcttgtcgctgtccatgcgaatataggccgggccgggttgcgcgatgacatgacggacaatctctgccgcttgccgcgcatccgccggcgcatagacgctgagattgcccagcgtacgggcgatggcgatatcgttcatgcagtggtgcgtcgcccccagtggcccgtaaccaaatccggcattcaggccgagcattttcacgttggtctccgtgtagcaaacatcgtttttcatctgttcgtttgaacgagcgaacaggaagggtgccgcgttggcggtaaagaccgtacggccgctgagcgccatgccggcagccatgccgaccatgttctgttcggcgataccgacgttcactacccgctccggataagcctgctcaaagggcgcgatttttgacgtggacgtggaatccgccaccatcacgctcagatctgcacccgcccgttgctgttcgatcaacgccgtcaccaccgcatcgcgtaaatcctgcatgtttacccctccagttccgccagcgcctgcgccagctgttgttcgtccggtaccgcgtgatgccaggcggcaacgttagccataaacgacacgccgtgccccttttcggtattggccaaaatcactcgcggcttgtcctggctcggaagttggatcgctgccaccaacgccgccggatcgtgcccgtcacactcgacggtttcgaaaccgaacgcgcgccatttttccgccagcggttccagcggcatgatggcctccgtcttgcccgccagctgcagccggttacgatcgacgatggcgatcaggttatccagcttgaatttgctggccgccattgccgcctcccagttggatccctccgccagctcaccgtcacccagcaggacgaaagcgcggcgatgcccacgccctgccagcttattgcccagcgccaaccccacggcgatcggcagcccatgccccaaaccgccggaattaatctccaccagctccggcaacttctgccgcaccggatgcccggccaacaaggtgtcgtcgcccatgaactgatcgagcaccgccggatcgagcaagcccatcgccgcacagctgcagtaaaaaccgccggcgccgtgccctttagacaaaatgaaccgatcctgatcgggccgggcattgctgcgatccatcactgccatatacaaagtgcagatgatgtcgatttccgacagatcggcgccggtatgacccttgcctgccttatggttcatggtcaccacatgtcggcgcgcctggcgtgccgtgtttttaatcgcctgaaagtccatcgtcacctctgcttaagcgccttgattatcgttatcgcatcaaaagcgatccgttaactcaccattgattttcgaatggaaatcatatgcagcaaaaacgataattaatgtgggcaagatcaaatttcaaacaaaagcacttatcagacaacactcatgtcgacaaaaaccaataaataacaacatgataaaaacaacccagctgctttaattgagttttttatcgttgatttaatcggataccaatgattttcgaataaaaatcaacgctgcttaaccgggtttatccgtggctttatcaataatcgcgagctaaaattcagcgcatcaatatggagtggccgtggcaaaccgcgcggcgggaactgacaggtgcaggagtctttcgattgaaaagcaaaagcgaacagttggcggaaatgcagcaacggcgcgaaaagatcctcgacatgatccgcgaagacggctcggcgacggtcaaaatgcttaccgataccttcaagctgaccgaggcgaccattcgcaccgatctgcgcgtcctgcagcagcaaggctatgtgaagcgcttccacggcggtgcaaccctggttgatggcaagcaaaatacgcatgccatgctgctggaacgccaggttaacctgaccgccaaagatcgcatcggcaaactcgccgccggttttatcgaacccggcgacaccatcattcttgattcgggcaccaccaccacggctatcgccaatcacctgaatcacataaagaaactgtccgttatcaccaccggcgtcaatattgcgctgcagctgggcggcgaaccgggcgtgaatattttgctgaccgggggctcattcaaatttccgacgctctccacctccggggacaaagccgccaatttcttcgaaaacgtgctggcgcaaaaactgttcctcgcgacggcctgcatctcgccccgccacgggctcagtttcccaagcgaaaccgacatcaaactgaaaatggcaatgatcaatgcagccaacacggtgtatgtggtggccgactccagcaagatcgataaggtttcaatgtttgcgctgccttgtgactggcaacatatcgactatttgattaccgataacggaattggcgatgccgccaggcaggcatttgaacaggtaggcgttaaggtattggtggcagacgcctgactggcgcctgcgagaagaatgcttattccggcttgcgcgccgcgatttcctgctgctcttgtggcggcggcgtcagcgggccgaaccagcgctgcgccagccagcaggtgaccaccaccagcagccaactgatcagcgtagccatcgccagatcgcgcggccagtgcatgcccagcagcagacggctgcccatcacccccgttgcccacaccatcagcaacgcaacggttttataatggcggcgcggccacagcagccctacgcccaacagcgcccaggtggcggcgaacatcgtatgccccgacgggaaagcgaagccggtttcaaactgccagtgcttgcgcagccagttcggcaccagcgtctggtcttgcagttgctcgcgcaccagcgcgctgcgctctttgcgatgcagcgaatagaaatattttccgtccacgccgtgggtttgctcgagccataccacaaacggccgcggttcttgcacccgatccttgatcaacgacttgaccccctgcccaatcaccaacgcggcggaaagcaggatcgccagaccgatggccgccttcagccgaaagcgcaggcaccacaaaaaccaaccgcaaaggatagcgctggtcagaatgccccacggcgaggttacggtttcggtcacccagaacagcgctttgagcagccgctcattgccgccgggctgccaatgccagccggaggcccataccaccagcggcatcaacagcagcagcagcgcgccgcccgccgtacgttttgctatctcatacattcccgttttcctctgcgtgaatcaggttgcagtgtaacaagagtgcaatattgataacacgcgaaaaattaaacagatagaaaacctatcgcaataataggtggccagaaaacgccatctgctggtttgctgagcaccgcccggcaagaagttgtggcaaaatagccgataattaacgaaatagagatcggcgtagcacgttttagtcttggtcaatttactaaaccggacttaggatgcgcgacaatgattgaatcgtaggtttttgtggagagtgacatgcagctgaaacgggtggcagaggctaaactgccgacaccttggggcgatttcctaatggtaggattcgaagaactggcgaccggacatgaccatctggcactggtattcggtgatatttccggcgaagcgccggtgctcgcacgcgtgcattccgaatgcctgaccggcgacgcgttattcagcctgcgctgcgactgtggttttcaactggaagccgcactggagcagattgcggaagaaggccgcggcatcctgctgtaccatcgccaggagggccgcaatatcggcctgttgaacaagatccgcgcctacgccctgcaggataagggcgcagacaccgtggaagccaatcaccagctcggcttcgctgccgacgagcgcgacttcaccctgtgtgccgacatgttcaaactgctgggcgtcgacgcggtgcgtttgctgaccaacaacccgaaaaaggtcgagatcctgaccgaagccggtatcaacatcagcgaacgcgtgccgttgatcgtcggccgcaatccgaagaacgaacgctatctggccaccaaggccgccaaaatgggccatttgctcgaccagaagtgatcgccaccgccgcggaaacaatcagggcgccttacggcgccctttttattgattaattacagcattttcctgatcacatagtgcaggatgccgtcgttttcgtagtaagtcagctcattgccggtatcgatgcggcaacgggtgtcgaccacttccttgcgcccgtcggtataggtgatgtgcaccggcaccgtctggcccggctgaagctgttgcaggccgccaacgctgatctgctcatccccggtcagccccagcgttttacgcgtcaccccttgcgggaactccagcggcaaaatccccatgccgatcaggttagagcggtgaatacgctcgaaggattcggcaatcaccacccgcacgcccagcaggcgcggccccttcgccgcccagtcgcggctggagccggaaccgtactctttaccggcgatcaccgccagcggcaccttctcctgctgatactgcatggcggcgtcgtagatagacagctgctgttgcgaaggaatatggcgggtatagccgccttccacgcccggcaccatttcgttgcggatgcgaatgttggcgaaggtgccgcgcatcatcacttcgtggttgccacggcgtgaaccgtaggagttgaaatcctgcggcgctacgccatgctcgctcaggtaacgccccgccgggctgtcgcgcttgatgttacccgccggcgagatgtggtcggtggtcaccgagtcggccagaatcgccagaatgcgcgcatctttgatgtcctgcaccggatccggcttcaccttcatggtgctgaagaacggcggatggcggatataggtagaatcctcctgccactgataggtcgccgaaccggtcacctggatcgcctgccagttggcatcgccgtcgaacacctcgccgtactccttgtggaacatctcggtgcgcacttcttccaccgcctgagcgatgtcccggctgctcggccagatgtccttcaggtagaccggctggccatcgttaccctcgcccagcggctctttggtcagatcgatcttcatgctgcccgccagcgcataagccaccaccagcggcggcgaggccagccagttggttttcaccagcgggtggatgcgcccttcgaagttgcggttgcccgacagcaccgcgcccacggtcagatcgccctctttgatcgcttgctcgatcggatccggcagcgggccggagttaccgatgcaggtggtacagccataccccaccaggttgaaccccaactcttccagataagcggtgagtttggcgctgtcgaagtagtcggtcaccactttggaacccggcgccagcgaggtttttacccagggtttgctgcgcagccctttcttgacggcgtttttcgccaacaggccggccgccatcatcacgctcgggttggaggtgttggtgcaggaggtgatcgccgcgatcaccactgcgccgtcgcgcagttcgtgctgctgcccgtccagcgtaaaggttttgctgtctgtcttggccttgtggccgccgatatccagctcggtagcagccttgaacgcctgcggcacattcggcagcgccacgcgatcctgcgggcgtttcggcccggcgaggctcgcctccaccgtcgacatatccagcgccagcgagctggtgaataccggctcatctcccggattgcgccacatgccctgcgccttggcgtaggcttccaccaacgcgatttgttcggcgctgcggccgctgagcttcatatagccgagcgtaacgtcatccaccgggaagaagccgcaggtagcgccgaactccggcgacatgttggcgatggtcgcacggtccgccagcggcagatcggccaggccgtcgccgtaaaactcgacgaacttgccgacaacgccgtgtttgcgcagcatttgggtgacggtcagcaccagatcggtggcggtaatgccctcgcggagcttgccggtcagcttgaagccgaccacgtccgggatcagcatcgacaccggctggcccagcatcgccgcttccgcttcgataccgccgacgccccagccgagaatgcccaggccgttgatcatggtggtgtgagaatcggtgcccaccagcgtatccggataggccacgcggcggccgctttcgtcgctgtgccacaccgtttggccaaggtattcgaggttaacctggtgacaaatgccggtgcccggcggcaccacgcggaagcggttgaaggccttctgcccccagcgcagaaaggtgtagcgctcgtggttgcgctgcatttcgatgcgcacgttgtcttcaaaggcattatcgtcgccaaattcatcgacggtgaccgagtggtcaatcaccagatccaccggtgacagcgggttcacctggtcgacattgccgcccagccgccgcaccgcttcacgcatcgccgccagatccaccaccgccggcacgccggtaaaatcctgcatcagcacgcgtgctggacggtaggcgatctcacggtcagcatggccggtttgcaaccaggcgacgatggccttgaggtcgtcaacctgcacggtgtcgccatccacatggcgcagcaggttctccaacagcactttcattgatttcggcaaccggtcgatatcacccagctgcttcgccgccagcggcagactgtagtagtaatattcgctattcagcgcaaccagcttatccagacttgtttcacgaagatcggacgacatagctcctccatttcttattgtgattaaaacagggtaatcagtgaggtcttgtttaaagataccacaaagataagttaacgttttgataacaacacgatttgatcacaacgataggcgggaacaatcaagaggaaggaagtgcgagcgcagccaaggagttaggccacacgtcaacgaaaacgccgcaacgaggcggcgttttcgcagggaaaatctcgcggctctagcgggattggcgcaccaggcggcgacagactgtgagcacaactgcagcaatgatggcagagacacccaatttaatggcaatgacagccgagtcgaaattattcatccctatttcaccatcaccgctaatttcaatgttgttggaaacgaagctgtcgaaaggacggcggcttttcaggatgatcctgagaaacaaggaaggtgcgggtttccgggctaaaaaaaccggttaggcaggcacctaaccgggtttgatttgatatcgtcaacgattacttaatcggcagcttgatgtccttgaacatcgcttcgatttcttcattggagcgcagcgccactgcgctgtcgaccacgtcgcgcgtcaggtgcggcgcgaagcgctgaatgaagtcgtacatgtagctgcgcaggaaggtgctacggcggaagccgattttagtggtgctatatgtgaagatatcgcgcgcatccaccgtcaccagatccggatcctgcaccggatccaccgccatgctggcgatcacccccacccccaatcccagacgcacataggttttaatcacgtcggcgtcggtggcggtgaagacgatgcgcggcgtcaggccggcgcggttgaaggcggtgtccagctccgagcggccggtaaagccgaaggtgtaagtgacgatcgggtaagccgccagctcttcaatgctgatgctgcttttgcccgccaaaggatgatcgggcttcaccaccaccgcacggttccagtggtagcacggcaacatgatgagatcgtcgtacaggtgcagcgcctcggtggcgatggcaaaatcggcggtgcccttggagaccgcttcggcgatctgcgtcggcgatccctgatgcatgtgcagcgagacgcgcgggtaacgctcgataaagcccttgatcacgtttggcaaggcgtagcgagcctgggtatgcgtggtggcgacgtacagcgagcctttgtccgggtaggtgtgttcaccggcaacggctttgatggcgtctactttggacaacacttcacgcgcgatgcgaatgatttcctggccggcgggggtgacctgggtcaggtgcttgccgctgcgggcgaaaatctggatgcccagctcatcttcgagcatgcgcacctgtttgctgatgccaggttgagaggtatagagcccttctgccgtcgaggagacattcaggttgtggttaaccacttccacaatgtaacgaagctgctgcaatttcatatcttataccatcctaggttaaacactgcggcttacccgcagccaggtatatcggtgtcgccccggtatgctgaaactcacaagccataaaccccgtgttctaccctgatggtgaagaaaacgccgttgttaataagctttaataataaaaaaactttttatataaccactataccacgatgcagcttcaagtatagatccgcgtcacactatgataacgattattttgcatgggtatcaacgtgaaacggcggtgtcggagggataaaaacagcaaaggatagatccgtttgccccttttcaccaataaaaaaaccagccgccagggctggtttttcatcttgcgggcaggacatcggccttacttcttgccttcgacccacttgccgtccacgtagaacgcggaccaaccggtcgccttgccgtctttttcagaggagacgtactgctgcttggttttacggctgaaacgcaccagcgttttgttgccttcggcatccgccaccggcgcatcagccagatagcgcagtttctccggcagacgatccttgaagcgagccagctcttccaccaacggcgcgcgggtctcgcgcgatttagggaaggtgttggccgccaggaacacgccggcagcgccgtcacgcagcacgaaataggcgtcggacttctcgcacggcagttccggcaacggcaccggatcttccttcggcggcgcgacatcgccgttacgcaggatcttgcgggtgtttttgcagttctcgttggtgcagcccatgtacttgccgaaacgccccattttcaggtgcatttccgaaccgcacttgtcgcactccaccaccgggccgtcatagcctttcaggcggaactcgccctcttcgatctcatagccgtcacacgccgggttgttgccgcagacgtgcagcttgcgctggttatcgatcagatagctgtccatcgccgtaccgcatttctggcagcggcggcgggcgcgcaacgcgttggtttccgcgtcgtcgccttcgaggatgttgagcacttccgcttcaggcaccaggttgatggtggttttgcaacgttccttcggcggcagcgcgtagccggaacagccgaggaacacgccggtgctggcggtacggatgcccatcttgcggccgcaggtcgggcagtcgatgctggtcatcaccatctggttaggccgcatgccgccttcttccggatccttctccgccgtttccagctgctcgctgaaatcgacaaagaactcgtccagtaccgctttccactcggcctggttgttggcgacctcatcgaggccgtcttccatgcgtgcggtgaagtcatagttcatcagctcgcggaagttctcttccagacgatcggtgacgatctcgcccattttctcggcatagaaacggcggctttccacccgcacataaccgcgatcctgaatggtcgagatgatggaggcgtaggtggacggacggccgatgccgcgtttctccagctctttcaccagcgaagcttcgctgtaacgcgccggcggcttggtgaagtgctggctcgggatcagtttctgcagatccagctcgctgccgatttcgacgaacggcaacgtgcgatcttcatcgcccttgcgcaacgccggcatcaccttggtccagccgtcaaagcgcagcgtacggcccttggcgcgcagctgataatcgccggctttcaccgtcagcgtagtggaatcgtattgcgccggcgtcatctggcaggcaacgaactggcgccagatcagctgatacagcttctgcgcgtccgcttccatgtctttgagctgctcggcgagcacgttcacgtccgaaggacggatcgcttcgtgcgcttcctgcgaattctctttgctgctgtactgattcggcgccttcggcaggtatttatcgccgaagttgtcgccgatgtagccacgcaccatgttgagcgcatcctggctcaggttggtggagtcggtacgcatataggtgatgtggccggcttcatacagccgttgcgccatcatcatggttttcttcacgccgaagctcaggcgggtgctggcggcctgttgcagcgtggaggtaatgaaaggcgcgcccggcttgctgctggtcggtttgtcttcgcgatccagcaccgtgtagcgggctttttccagcaacttgaccgcggcgtgagtctgctcgcggttaaccggcttgaacggtttgtcgtgcgcatgggtcacttccatctgcagcgcggtttcacccttcgccagcagatcggcatgcagctcccagtactcttccggcacgaacgccttgatgtcgcgttcgcgctccaccaccagacgcaccgccaccgactgcacacggccggcggacaggccgcgggcgattttcttccacagcagcggcgagaccatataacccaccacgcggtccataaaccggcgcgcctgctgcgcgttgacacgatcaatgttcagctcgcccggctgtttgaacgcctgttggatcgcgtttttggtgatttcgttaaacaccacgcggctaaagcgtttgtcatcgccaccgatcacttcccgcaggtgccaggcaatggcttccccttcgcggtcaaggtcagttgcgagataaatgtggtcggcgttttccgccaacgattttaactcggcgaccactttttctttacccggcaggatttcataatgcgctttccagccgtggtaagggtcgacgcccatgcgatttaccagcgccgccttctcatcttttttaacttttttcttggctttgtcttcggttgagtcagcgctctttttgctggctgagccactggtcggcaaatcacggatgtgaccgacgctggacttcaccacgtagtcacttcctaaatatttattaatagttttggcttttgccggggactcaactattacgagagctttacccatatttacctttacctaatttatttcttctaaaaagaagtcttttatctcgccgtgccgcggcaattcgtgtctctttttttatattgcggcagtctggcaagagatcaacagatttttttcttttggttgcccaactgctcaacctgaacgcaagttgttgatcctgcctgctattcacccatgccccagaagtatggctgtgtgagttttattcatggcgtaaacaaaaccttccacccgacgccgcaaaatcccacactgtacctgataaaaagcgtcacgcaacctaattagcatggaaagtccgatttcgccaaccggcggccgcccatggccatccagacggcaaataaaccttagtcggtttgcggataaaagcgaaccggcgttagaatatgcgcagagtttttagtttggagtctaataaatgcgcacgaatactgcacctatcggccgcgaggccctgctagcggaagcaaataacatcatccgccaacacgaagattatctgcacggcatgatcgccaccgacgttgaacaaaaaagcggcgttttagtttttcgcggcgaatactttttggatgccgatggattgcccaccgccaaaaccaccgcggtatttaatatgtttaaacatttggctcacctgctttcggaaaaataccacctggtcgattaagacaagaaaacgggggcgcctggcccccgttgattcccgctctcgttgccgttacaacaacggcttttccccacgctgccaccagcgcagcagcaaacgatcgacgctttccgccgcgctgccggtgaagcgatccatcaggcgtttgcggcgcgtatagcgcacagcgatcacttcgtggttatccagctcggcgatcagcaaatcatcgctggtgccgatggcgtcgatcaggcccttctctttcgcctgtgaaccgaaccagtgctcaccggtagcgacgctgtcgatgtcgagcaacgggcgctgctcatgcacaaagcgcttgaacagctcgtgcgtttcgttcagatcttctcggaacttctcgcgcccttgttcggtgttttcgccaaacagcgtcagcgtgcgtttaaattgcccggcggtgtgcaactccacgtcgatatcgttctttttcaacaggcggtggaagttcgggatctgcgccaccacgccgatggaaccgatgatggcgaacggcgccgccacgatgcgatccgcaacgcaagccatcatgtagccgccgctggccgccactttatccaccgcgaccgtcagacgaatgccgcctttgcgcaggcgctccaactgcgaagccgccaggccgtagccgtgcaccaccccgccagggctttccaggcgcaacagaacttcatcctgcgccgacgccaccgccagcaccgccgagatctcttcgcgcagcgaggtgacctcgtgcgcgtccatgctgcccttgaagtccagcacatacaggcacggcttggccacttccaccgcgccggacttggcgcgctgtttcttcaatttgtcatcagatttagtctgctttttgaactgtttcagccaaaccttctgctcggcggcatccatgcgcgccaggcggatatcgcgctgcatctcgcgatactgttcgccgagatcggtcagctgcagctcccctttctggcggctcttgcgttgccccaaactgaccgccaggatggccaacgcggcgatggcgagcaccaccgtggcgaccttggccagaaacaggccataaacagatataaactccacagattccgcctttatttacaggttgttagtatgcttatttccattttagccaaccgcagcggctgctgtcgcggctaaatgaaaattcattgcgcacagagcatcactatggggacgatttacggccgaaccaagccgccaccgccgcgcttttgttacaaaagaatgccatttcagcctgctacgcattgaaaatgcccgcggattaaggcatataacacccattattcatcaatatgatgagacggattcgctgcgcggcccgcagacggtcgagccttcgctcccgccccggccgcgcgtttcacccttgctccccgatatctgcgggagaacagccacccaggcgaggatttatcgtgcattaccaacccaaacaagatctgctcgaacaacgtatcattttggtcaccggcgccggcgacggcatcggccgtgaagcggcgctgacctacgcgcgcttcggcgcccagttggtgctgctggggcgcaccgagagcaaactgctggcggtacaacaagagatcgcagcccagggcggtgccccggccctggtggtgacgctggacttgctgcacgccactcaggagcaatgccggcagatagccgacgatctggcgcaccagatcccccgccttgatggcgtgctgcacaacgccggcctgctcggcgacatcgcgccgatggccgacctgtcgatgaccatgtggcaagaagtgatgcaggttaacgtcaacgccacctttatgctgactcaggcgctgctgccgctgctgctgaaatcccacgccggttcactggtgttcaccagctccagcgtcgggcgtaccggccgcgcaaactggggtgcctatgcggtgtcgaagttcgccaccgagggcatgatgcaggtgttggccgacgagtacaaaaaccgcaatctgcgggtgaactgcatcaatccgggcggcactcgcaccaaaatgcgcgcatctgccttcccgcacgaagacaagaacaagctgaaaaccccgaccgatatcatgccgctgtatctgtatttgatgggcgaagacagccgccgcaaaaccggcatgagcttcgacgcgcagccgaaccgcaaacccggcgcagccgaataagcaggagcgtttcatggcggaagatcgtcatcaacagcgccagcagcgcctgaaagaacaggtcgatgcgcgcatcgccgcggcgcaggacacccgcggcctgctgctggtgtttaccggcaacggcaaaggcaaaaccaccgccgccttcggcaccgtcacccgcgcggtcggccacggcatgcgcgccggagtgatccagttcatcaagggcgaatggcccaatggcgaaaagaatctgctgcagcaacacggcgttgaatttcaggtgatggccaccggtttcacctgggaaacgcaaaacaaggccggcgacaccgccgcctgccaggcggtgtggcagcacggcaaacgcatgctggccgacagcagcctggatctggtgttgctggacgaagtgacctacatgctgacctacggctatctggaactggaagagctgaaggcagcgctcctgcaacgccctgcgcatcagacggtgatcctgaccgggcgcggctgccatcgcgatctgttggaactggcggatacggtcacggagatgcggccggtgaaacacgcgttcgacgcgggcgtgaaggcgcaacaagggatcgattggtaacaaaacgttctggccccgaacggggccagaacggcgggattagctgcgtttgcttggcttgcctggtttgctgcctggcgcactgcggcggccgctgccggccacctgcgagtggcgcttgaccgcccggcggatctggttggccttcacgcggcggcgctcacgctccaccggcattttgctgaccgtttccggtttcaactccaccagctcgcgcaggtagttgatcgccggcagatccagttcggcccagccgccgcgcggcaggcctttcggcagatcgatgtcgccgtaacgcacgcggatcaggcggctcacctgtacgcccaccgcttcccacaggcgacgcacttcacggttgcggccttcggtcagggtcacgttgtaccactgattgaggccttcaccgccctggaagctgatggtacggaaggcggccgggccgtcttccaattgcacgcctttgctcagctgcttcactttcgcatcatcgacctggccgaacacgcgcaccgcgtattcgcgctccacttcacggctcgggtgcatcagacggttggccaattcaccatcggtagtgaacagcagcagaccggaggtgttgacgtccaggcgccctaccgccacccagcgcgaaccgcgcagcttcggcaggcgatcgaacaccgtcgggcggccttcaggatcgctgcgggtacacagctcgccttccggtttgtagtaagccagcacccggcaaaccacctcttcggactctttgatcgacaggacatgaccgtccagacgaattttcatcgccggcgtcacttcaacgcgatcgcccagcttggcgaccttgccgtcgacgctgacgcgcccggcttcaatcatggtttcgatttcacgacgcgagccatgcccggcgcgcgctaaaactttctgtaacttttcgctcattgagcaacctctaatgtcgccttcacaggcctcatggtatgctatattttcaattggttacggcaaaaaaccccataaccatataattttgcacacattttggaatacgttatgtcaaacaaggtgtcacacaaactgtcacacacaatccaacgtggccggacattctacacaaattttagacttaatgattccaaaaagtttgttcggttatcacttaatactgacagtttgaaacaggctcagttggtcatgtccaaaatgacgccttatattccgttggttcagtctggagcaatgtccgtggacgagttcaaggcaaagctcaacggcctaaaagacctcaccaagcaagatttggatacattccttttgcgccaccttgaagacgactacgaagaggtggaaaggctgccaaaacttgggacactaacgaaacaatatttcggcggcagtattgaccgtgaagcgacgaaaaatgacgctacaggctatgcgagagcaactatagataatatccattcaggctcagattttggactggccgcccttaagcattccctacggcacagggggatcaatcctgagggactaccggatgaaatgagcgatgtcgttagccagattgatatgtcgttggctatgaagtatcaagcttacgaagcattttattcagatgacttcttgaaataccgccaaattttgggttcgctcaaagaacaggtaaagagcctctcagatagagcgccgagtcaaaaccacgctccacaagttcagtcgccctcatccgcagtacggctatctgaagcttggaaaatgtatgttgcagacaaggggcagaaatggcggcgttcagtcgccagtgagaatcaacgattctacgatgttcttttcctcgttgtgggaaatattcccgttgatagcgtcaccaagcagcacataagggaagcactgaagattgccgagaatctccccgctcgaacccgatccccctactccagcatgactctagccgaatgcgttgcctatgatgtcccggaggaggatttaatctcaagtgaacacgtccacaagcatttgaagatatggcgctctctgttcaaaacgtaccttgtcgatcacaaggacattttgacgatctcacctactgacggaataacctatgaggtgattcctaatcgagggggtcactatagcgctggtgaaatgaaaaagttgaaaaaggctctgtccaaccttcccgacacagactggagaaaagattacttcctcacgctcatttataccggtgctcgtcgtgcggagattgccgacattcgtaagcggcacatacggcgcgatgatgaaacgggccgacattacatattcatcgagggtggtaaaaccgatcacgctcagcggcaaatcccagtccacaaaaaattggagggggacctgttcaaacgtatagccctactatcagacgaggatctggtgtttggaggcctacctgattacacaaccatcacgaatggatgggttgctatattggacagtctcggaatcccaacctatgacgagtttggattaaaacgccgaattcatagcctgcgccacacatttataagcacagcgatttccagtgtctcaaacgcggctctggtacagttcgttgtgggccatagtcggacccaatctttggggattacctcgcggtacacgcacaggcctcacctcaaagagctattgtgcgtagttgattgcatcagttgacatatcatgtataaaggcaggagattggcgcgtcaaggtggcagaacctaacacgccagtaagactattaggtattccagtgattctgcatatactcgagaacatctgaagttatattataacaataaaaactgttattctcagcatccacaactactaacttatcatcatggtccatcgctgatctcacgatattagcagcctgctccgccgtataagttgaatcaacataccagttggattctgtaacttttgcccaatcgcccagagatttaattgctttgtatacggcctcataatctttggttttgatcaggtcatatgtaacgaacagattgttagccattctcatatctcccagagtttcaactttaaatgaagcgccttacggcgcttctcatatcacttcttctctttctttggatacttgatcgtttccgtaacggtagtcttagggtgccgctttgcctcagcttcaggcacaaactgaccagtaattgcgctacggacaactttacgttttgacatgaggacaacctctcttagattttaggtgtgagggcgcatatgcgccctcgatgttcggtttcttcaaccagcaatggaagactgattataagatgccattacgccctcgttatagcctttggcatatgctgcctgcgggcttttgtggcgaacagttccggcttggctgtcaggcaaagcatcaaggtcaacccatacttgagggctacgattaaagccgtgctgaaagccttgttcataagcgcaaccgcagcacttatgacgaccagaaccaccttgatcttcaggtagttgaacaaacattggagagtaccgatgacggttgtaacatatagccattctgtattgccttagcccttcagggcacaaaaaggttttacaaggcccgtctatgctgtctacaatccgatttgtcgaatgtaagaaagtagctagctaacggttaactaagggtcgccaaactcttagaggccttgcgtctaggaaagccgagttcacaatgtggattcggcttttttattgccaaggagtttcaaaacactatatgtagtgccccttaattccttaggtaacaagatagtgagaaaaaacggcgtttgcaagtgaacaaactcgggctaatttgtggataacttgggggtgaaatgtaacttgccgcgcgaatcgcgcgccgtgactggcgcgtcaagcttgtcaataagcgtgaacagattttccttaaaaactgaaaaaaccgatcgttcgtgcgacgttttattaaacgttagaaaaaaacggcataattaaccgatttgatattcgaaatttaagatttcacgcctgaagggatggaactggtttaaatgataacttttgtcgcttagagtcttctgtatcaaacgtctttgtacaaggacctctctcctttgtggcgaactaaaagctgtggttcgaattctcatagatgcaaagcgttttaccattggagagctgctcacttgtcggattgctcatagtggccttccctgcataagctggagattgcagcccaaacaggtagctatccccgcccccgccaaaatttcaggtctcatcggtggatctctcctgtggtagacagctagaaaaatattctatgccgtatgcacaacccgtatttttcttagtggtgcttggcacctaccctccggcccgtcaatactttttgagtgattctcaaatatccatgaatttgggcctgtacggcccgctgtggccttttatcaccccaatcccaaccaacctacctttaatccctctcagggcctcctagagcctcccagagaagatgttagtttttacttacctcacaaccccctccagagctacctatttaacataatgggtcttacgcgcacctttgcaacacatccgaccactgagaaataagccttacacaagcctcagccccgctatgcggtgctttggcctgacttgtcggacaagatcgggtgttatcaacagagatcagtgtactgtggatgtttttagggtttctgtgggtaacttgtgcatgaatgcacgatattgcagaaatggagcctaaagcgactagacagccgctaggccctgttttgggcgacaagatacggaccgaggcccggaggggccgaggttggtgtaaatgagaatcattatcacttccaagaaaatgaggcgtcattttgtcacttcttgtcacgtattggaggaacggaaagtttttgtttagcacctacatagcacctgagtatcacttctaaatcctcactacccagccctagcttgtcccaacaagagataaccccttgtccttgctcgacaaatcaagtattcctaaagcgtctcgcatgttacgccgcggagggcgtcggtacattatttgaccaatggttactgtgataatcacccaatagttactatattacataaccattagcacatgataacggttattaaattgtatttgatcggatttattagggtttattcggaaaagagaaaactgttatttatcggtcttacctatcagttttacctttgcaccctccattaattcaccttgctcaattagggcgtggttgtgtcccttgattgctgctgtgtctggggcgtttatagggtttgagaagttaccattttggattgtttctttaatggttctcactccaatatttccggcctcttgtagtgccttgatattacgctttccattggctgcggattgaatgaacaggcggatctgtttctgttggctctttctggcggctacccctgcgctaaacatgaaattacgggccggtagtccgttccatccttcctcatgaatacgggccaaggttgccatattcaggccgctgtggtgtggctcatcataataaccatattctacctccggggcctcatcgataatcttgtacatgtttatcaggccgctgaaatcggattttaaagccatgctgttaatctccctagctagttataagaaaggccctagccgttaagcgtagggcctgtatatcgttgctgtatagttgctatatcgttgccgttagcctgctgatcctgctgtagaggataggatcatgtttaaggttctcatgtcctgatctttaagcatggattcaaccaatccagacacagccccatcatttacttgaacctcagacctaatcagcaattccttttgatcaagggtaacagtaacttgatttggcttaactggtgagctggttcccggtacgttaatcccggtggttaggttcatttgtggagacttgaacgggtaagagatatctgggttagattggcctgttggagccgggcttacccattgtttccaccacccccggaaattctctccagcctctgctacagcgtccgaacccggcagggtatttagaccttttgccagcgggttttctttgcctagcgactgtgggaacagcttttctagaggttcagccaccatatcttgaaggaatacaccccaaccgatagggccagccctgcgggaaactgctgtaactgcgctacctgcaatcttggcggctttgctgcctgtcttgccggttcccggctggttattaccacccaccccgccggtggtcattgcgccgacgttggcaatacctgcggcagataaagcacctcccagagatttaatccccggcaccaatttgatcagaccagataacattttggtgatgcggagcaatccacctgcgaagattaaagcccctgcggcataaccggcaaagttgaaaatttcctcaatctgttttgaatccattccccactttttgagataatgctcaattgtcatatctgcgaatacaaacgagttataaacacctgcgccaatctctgtaaatccttcaacaagaccggctaaagcattacccaccttgccgctcatcatatcagacatcccggagagcgctttagatgcaacctcgaaactttcccccattgcatcgcctaatttggattcaaaaatggagtttttaaacttattccattcgttcaccattcggttaaaacgggcgttaatccctttgactgcgaaatctaatgcgccgcctttgcgagccatatcaccgaaagcttttgctaggtgtggggtgatcttatccattgtaataagaccgttggacatatcctcgtcaaacattccctgagtcatattcaggttgccggtggcattctgccaagctgttaagaatgcttgcttagcgcccggcatggcgtcggccatctgtctgttgagctcctcggctgtaacgcgacctttcccgaacatctgttgtaatgcaaattgcgccagatccattttattcttatccaagtgcaaggctgttccgtattcttggaagcccgtaaacatggtttgcatttggttaagatcgaggtccttaggtcggctaaggttcattttagcgaatgcgtcagaggtggtaactaaatcagttcccagagttgaggctagattttgcagataatcaaacatctgcttcccttcctcttctgttttctgagtcattaaaatagttgaatgaatagactggaagtcaacgccggttttcattaggctgcgaccacctgccaagattccataacctgcgcccgctgtcatcatgccttgcataattggagacataccgccaccaattgaaccggagttcattgccaatgctttgctagtggctcggccttggcgctctacagctttcatttgcttggctaattcgcccattctggcggtgtaggtctgggtaccaattgcaccctttgcaaaatctttattgatcttggcaaagtctgccctaaattgggctttctggtaaacgctggcgctacctgcggcctgttggaattgtggagtaaatcgagacgctcgagcctgcattttatcaacaatgcgttgctgtcttaccatttcccgctgctggcggcgctgctcttgcttctcttgtcgttcctgctgcttacgctggcttgtcttacgcttattacctgcggcctcttggcgttcctgctttgccagccctgcccggtgttgggctgctacccactgaggggaaccggcaagacggcggcgggactgttttagaccctgtcccggtcctgcggcttctttattcagcttcttaatctgagccatagcctttttaaagctactctgatcaacctctgtaataatcgtgttagtagtcttaatgacttgattagacattaataattgccctccataatatagttaaccccttgctggtccatcatttccaacacttgggaggtaattagttttccctcgcagattaggatcggcttatccggatcaaaactgttcttaacccggcggaccttaatcaagccctgagaccgcattctattaaccaactctacagcctcgggggctggtgtatatttacggcggcgtttggctgctgcggcctctgcctctttcttggaaagcttcttagccattattccaccccgtctgtaatggtgtgttcaatgtcatattttgtcagggcttcaattaccaaatcattcaagattttaccgtctaggatatacatgggatcactacccggattgctaaccttgataatgttaatgggtttccgctggcctgtggctttacgaataagtttgcgcttagttaacaggctttcgtgtctgtggttagcgctgtatccctgatcacggtgacaaagggcaatccctttatctttaataggcctgccgtcaacatgtgggacaccgtcgatatattcaacattgacgtggtcatcttcagcggctttattcaggtgttgtttttgctgctgggtgatacttttcaaaacactatcgaaataggacatagcttattaactccttattggattggatgagatagatcaggatgtagagcgcgattatcggagctgctttccataattcctcgagcagtgcctttattatgtctcgccacattgggtaaaattcctccgctaccccgagaggttgacacggggaactttctagggtacaattcccataatgggaaaatgcaccctaagttttggttaaaatgaaagggattcctcttccaaccattggttaataacaccctctagcgggcctgtgaagtgctgcaagcggtttatgatataagcccttgcatctgtatcggcctcttgtctggtgctatcctttttaagccctcggccttttaaacttctccacaccttgcgggagactctatcccacccggttacattaggaacagtctcaaccccaccactacaagccccagcgctatcgctgtgatcattgtcagtctgttgtgaaggttgctcaatctggctttctggttcaatagttggagctggagcgtttgatgtgcattcattggcggtttcctcggcggcagttggtacttcaggggtggcggtttcggttactacgggtaaatctctcactaggtagttatttgaggatcttctatccttcctactaacgtaaataaaacctagctttttcaactttgaaattgaggttgagatagttctgtttggaatattaagatcggatgagattctatctattccggggaaaacattaccgaaccctttggaatcctgccaccctttcaggtaggcataaacaaaacggtcagtaaggttaaattctttctgattacaaatttcataatccatgcggataaaagtattcatgttatttgctcctgtgaatttttcagcggggatattctccggggtggttagccccgttttactgcggattgttatttgcgtgtggaagcttgcttaaagattgttccaaactggccccagatttgccaagggaaagagattttaatttcccggtgactgttggtcaggaggatttcaaaatctttataccaatcaccatttgcaagcatgacgtcatattgtcccatcatgtgatccaagcgttgacccttgccgcgttttagcgagtctggaacaccattcggatatttactcttaatctttgagtattccacaatctcaggcaggaaacagaagtttttgccaaagataaagcgagcggcgcggcgcatatcggtaattttgaattcggttctcattggggcggtctccttaggctgcaatgccatgtttgtaaatagtcttaatgccagcctttgcggccttggcaaattccaacatttcaacgaatgaatcattatcgtgcatggtggcggatacaattccttgtcttaaatcttccaccgaataactgaataggctttcaggccctttagtcagtacatcgctaaccatcttctccaacacactagcgccgggaatatctttatcaatccctgaggtgtaaacggtgtcggatcccaactcaaagcggccagacactttaatgaatccgagctgttcaaggcttctagcctgcgctctaattgccatgatagaacacggcataatgtttagcaggtcataggggccaatctcttttttatcctcgatgatcttaagcattctataggctagttctgtcatggtaacgccacggtaaaacttataacctctaattcccttctttctcattacacagactcctttaagcgttcgaatgtttcttgatgaatgattgcctgattcaaaatgttctgagcgtctccaccttccatttcaaaactgtgaacctcaccattaataataagtgttacagctaccggcttttccccacctgctgtaaggtaaaataaagaggtacaacccgagccacctcccggagagtagcggaccggtttcttttccaacattaagcggcgggcgtatcggaattgctcacgggtccaacctagttccttttgcaagagagcttgattaacctctacacaggatccgtttgcacgttttgaaagggtatcgaacaggatttcgtattttttcattaggcggtttccttataagtgtttttgcagttctgcaatgtttaagacgatagagtaagaaggctctcccctgcgggccggtaaggttgcctcgaaggttgaagcattgcgacccacaagcagcgcaaggaaaagtttcaaatctgctttacttgattcacacaaggtgttagcatagcgttgttcatatgtaataatggcggctcctcatgcttggcctgttacaataacagaccctgtatatattttacagtacttttccacctttagcaaccattttctaaatgaaagtttgactattttttcaggtgtgctattctagagggtttcccacaggtggaggcgggacagatcccgacctgccattttggcaccctattagaatactctttactagaataaaacaaacacaacaaaaacaataacttaccgtaagtcattgtttttgctggtttgatcccaaaaaggaacacataaactagatctaaaaccttactcgctccgctcataagcttttatgtgttctaactcgttcgctacgctcactcctaagaacaaacaaaaccaaaaagaaaaaacctttaaaatcaatctattactcgccattgctcgtaatctcttgattttaaaggcaaaaaagaaaggagttccacagattgcgctaaagcgctttcccacaggtgttagatctttaggttttattgttttctcttttttttggtttgtttgtttttgtggtttttggtttgtctctttaggttctgtgtatgcctctctgagaggctcactctgtggcagagggtaacaccctcttactgtgggatagaggcttacagcctcgcctgtgtggctaagggagggtttaccctcccgcactgtggaacagccgagcactatgtgagaggcattatataggcgcgggggtgtgggcggtgtagaaagcaatacaagacaggaccactaaagaaactcatataaaggcctctgagagctttttaaggggtagcctatacgtttgggtgggtacactctcaaaacctcttataatggcttacagagcgttttagacatatacaccaaaatacaacccaccaacaacacatcaaaccaacccattacactagacagaaaaagaaatcaatagataatcaaagaaaaatttgacaatccacgtatatctgataaaatatatattgtggagtggggaactgcttcacacccggtttaataaaatcactattcccttgatatcgcgttttgcaagagcgcccaagctggggaaagagatcacgttagattgggacattctcctttgtgagtttagttgaaaatccggcttagtaacccggcacggtttggcggcttcagcaccgcgcaaatcttcaaggcgttaggggtggttcccgatgacgcgccttttttaagtattctccaatgaatgagagtatttaaagaaggatctcctaccttctgttattggtatacgctagtacctcctatagggcattcgcccggcttattattccgcccacccatggcggaatattcagcgttaagtctgtaagggtttctccctgtttcctttgcaggcttagcgatgaatccgcttaattcatctttcaaatttgatcatcaaatgttttctccgaaacattcccaaagttatccggtgaggccatcgccggatgctttttatcagcttctttttatcagtcgcttgtttacgcttggatcggttacttggcggtttcctcctgtggactcaggcgactaataaaaggcaactccttttgtctttgggtgtattaggttgttagtgtgctttccaagggcctctccgttttggtgaggcttcttttttgaatacctaattacaatccagcaaacgacaaaagaaacccgccacccgaatcacgtttacccgatgtgatatggatcctcgtatgcatacctaaaaataggagaggaaccagcaaaacccaatccattcaaaaaggagttatatccatgagcattaaacatgttggtactgagtatcaatcaatgcaggacgtgatcgcatattctgcggatcctgtattcagtcacaaagaagttgttattgatctgcctgacgcggttaagccgggttatatcctgaatgctgcaactggtaatttagcgcaagccgccgacacggatgtggttatttccgctgatgaccgtgaagccggttccgctgttcacctgattgttgtggatcgtggcaacgttttgaagcgtggcgcactgaaagcagccgatgccgcagcgactaccgcacaaatcgcagcaattgaaaaagccggtattaaccgcgtagccgtaaactaagggagattatatataatgagtaaggcattcgattttgataatcaggatatgtccgctgcgtttgaacagccagctgtggaaaaccacctgatcctagagttgggcgtatttggtaaagatacctctaccaccccaaaagctaccgttgattacaaactggatgatcaatccaagcttttcgcgaccacggaaagatacggaaccgactataactccactgaagttaaccgcgctaaatccttcaccttggatattccgcacattaccgccactggccgtgtaactgcaaaagacttccaaggccgtcgggcattcggttctaaagatgcaaccgaacaaatggcgggtttggtagccgctgaagctttccgccaacataaaagctatctgcgtaccaaggaaaaaatgctgtctgatgcgctgttctataaccgtgtgagcgataagcataccggtgatgtagattttgaacaggtgttcggtttcaaccagcaggcccaccagatcgccgctggtgcggctgataacccgctggaaaccatgagccgtgccgttaaagacatcaagcaagtttccgctggccgtcagattaaccgcatggttgccgtgtgtggttcggaattcttccatgctgttaagtataacccaaccattatgcagatgggctattacaaaaccgcacctgttattaacattgacggtaaagaaatctctccgggctatgagctgtttgatctggatggtgtaacctatatcgaatctaataaccctgattatcaggtagattctaagggtgctttcctgctgccagtatttaaacatgactcccgcttgggcgcatcgccattcatgactattgcaggccctgcaagccgtgatgcaatgttggcagatagcagcgttattcgcgagttctacgcctattccgtacaagataaactccacaacgttgaagtattctcagaagcttctctgttgccaatcgtttatcgtccggatttcgtcagcaaactgaccctgaaataataggccagattagctaattagattcgcgtcagataggggaggaataatcctcccccttcttttttgaggggttattatgaaagttgttgttttagatactgacgggcgcgtattgctcacaggtgatcagaatatgataaaccttacgccggtctgtaaagacttggggatctcccgagccactcttacttgtatggaaaagaaaaagtcgctagaggactctctcaaatactacattaagaaatccaagactagaacggttgcactgaaatgattatttttgcgcttattatgttcgccattgtttgctataaataaaaaggccctccgcatttggaagggccttttttgtttgcaatactctagatgtaacacattgagcgatacagcatgagctacaggctgtcacacaaagccacccagcccaaaacatcgataacataacttgttgcttttattaaaaattaattttagatattgcgccttcacaggcgtcggggggataccgccgtggccaaccgccaccacggtcataatacgtttatcaggatcgaaccgcgtattatacaggctttctaaggtgttgaaacccactttatcggcggtggcccccacaggcggcgttcacggcgccaaaaaatcctccactgcccacagcaccgcgtcaggccgttccagaataccgaggtgagtgcgggcctcccctagacgcaccacggagaaaaacggctgctcggcggcaaatgcctgctgttgccgcaaatagtcgtcgcggcgatccaacgagtagatgtgccggcacggcggcggcgcgctcatgcccgccaggcgttgcagcggcgagccgaattgccggtaggcctgttcgatggccaccccggcggcacgccaaagccggtaatcttcctgcgccatctcgacctccagatggcgtttgacccgatcgtggcggatgccgccctgccaaaagtcgaacaaggcgtcgcgtgccgccagccactgctgcggctgctgcatgcggctcaccgccgtaaagaacgccggctccggctgcgtcatgatccagtcgagaaacaccatgccccgtacccgttgcggcaacgcttcggccaacgctaccgccagccagctggcgtgcgccaccgacagagtgaccgcgttatccaaacgcagcgccgtcagcagttggcgcacatcctccagcaagtcgtccgccgtcagcgacatctccgtggcttttgacgacaggccatggccgcgccagtcgatgctgatcacccgatagcgttcggccgccagagcgatgaacggctcaaacacggttttcggttcgcaccagccgggcagcaacaccaacgtgagcggccctgagccgacatcctgatagtcgagtatcatgttggcactgtgaaatgcggtcatattacctcctgcgcgtctctccccgacccgttcggggaataccgacggggataaggtgacagcgcagcaggtattgatctattgaagttcgtgcggaaagccccctgggcgcaccttatgaaaaaatgcgcactaattggaatgggaaattaatggcgcacgcagggataggcggcacttaacgccagcatgatcaccgacggtgcggaataatgcagttgctcaggatgctcgttcaaatactgcatcaccgcgtcggcggctacgccgatgctcatcccggcttccgggcagatattgcggttgccctgcatggaataagtatcgaatacgccggcgacgtatcccatgaacatgccgccattcagcgcttcggccacggtggcttcaccgcttttattttttacgtaaccgctggattccgccagcagaccactgcccgaataaaaccccgcatttgccattgaggaaaataataaggccgctaaaaaagaaacctgtttaatcattgctgcgcatcctgcccattatcaattctgaagtcttcaagaatagcggctttcacgcgaaatagcgtcgcttcagccgattttcagacaatgggcaaggtggcaacaattgacatcaacggaaaggcgccgcgtcgcccgccccctcacgcaccacttccggcgaggattcggtcagatcgatcaccgtggtcggctgttggccaaggaagccgccgtggatcaccagatcgaccaccttgcccaaatgatcgttgatctcttccggatcggactcggcaaaatcattgcccggcagcatcagggtggtggacatcatcggttcgttcagcgcctccagcagcgccaatgcgatcgggttcgacggcacacgcaggccgatggttttgcgcttttcattcatcaggcggcgcggcacttctttggtcgctttcagaatgaaggtgtagttgcccggcgtattgtttttaatcaggcggaacgccgtattatcgacgtgcgcataagtcgacaactcggacagatcgcggcacatcagggtgaaattgtggttgccgtccaactgacggatgcggcaaatgcgttccatcgccgccttttcttccagcatacagcccagcgcgtagccggaatcggtgggataaacgatcaccccgcccttgcgcagcacctcaaccgcctggttaatcaaacgcggctgtgggttgtccgggtgaatataaaaaagctgactcatgacttgctcctaaaatgatgcccgcgcgcgttgccacgcgcgaaaaatcagaccgcctcgccaggctgcggccaatcgcgccacaccggctcgaccccgcccggcagccacagtttgcggcccagttcgatccacgaacaaggctgatgaaaatcagatccttgcgaggccaacaggcggtagtcctgggcgtatttcgccaactgcgagcgctcatgcggcgcctgctgacactgcgccacttccatggcgtcgccgccgtgttcggcgaaatgcgccagcaaacgtttcaaccacttcgcggtcagatcgtaacggccgggatgcgctatcaccgcctggccgcccgattgatgaatcgcatcaatggcttgttctattgtacaccactgcggcggcacgtagccggttttgcctttggccagatatttcttgaacacctgcgccatgttgtccgccacgccaatctccaccaggtaacgggcgaaatggccgcgggtcaccgcaccggcccccgccaaccgctgggcgccggcataggcgtcgggaatgcgcgctttacccagacgcgcgccgatctcctgtgcccgccggttgcgacgttcggtttgttccgccaatagcgccaccagcgccgggtgcgcgacgtccatgcccaacccaacgatatgaatttcatggttctcccacagcgtcgagatttccaccccgttgaccagccgcagcggcaacgcctgctccgcaatggcggcggcggcctcagccaagcctgcggtggtgtcgtgatcggtgatcgccagcacgcccacgcgcatctctaccgcccgcagcaccagctgcgtcggcgtcagatagccgtcggaggcggtcgtgtggctgtggagatcgtacagagtaaaagcggtggatggggggttactgtctgtcaaaacggctatccggcaatggcttggctttctatcatacccgcgatcggcggccggacggaaatctattctgcgccaggcagacgatgaatagaattcacgctgatcgctaaaacattgtgcaaaaagagggttgactttgccttcgcgaaccagttaactagtacacaagttcacggcaacggccgtgtcggatgagagttaacaaagagagtctgcaaatgaacacatacatttctcttcacggttggtggcgtacctccctcttgcgggcggtgtaatcgcgcatagctgtcatctgacaatgcagatttcctgagcccgcacctgatgcgggcttttttatggacagaattcactggaaccaccgatgatgaacaccaaaccacaactgacattgctgaaggcgcaagccagctaccggggcgatcccaccacccttttccaccagctgtgcggcgcccgtccggccaccctgctgctggagtcggcggaaatcaacagcaaacagaatctgcagagcctgctggtgatcgacagcgcgctgcgcattaccgcactgggccacaccgtcagcgtgcaggcgctcaccgccaacggcgcggcgctgctgccgctgctggacgaagcgctgccgcccgaggtgcgcaatcaggcacgccctaacggccgcgagctgaccttcccggcgatcgacgaggtgcaggacgaagacgcgcgcctgcgctccctgtcggtgttcgacgcactgcgcacactgctgacgctggtggactccccggcggacgagcgcgaagccgtgatgctgggcggcctgttcgcctatgatttggtcgccggttttgaaaacctgccggcgctgcgccaggatcaacgctgcccggacttctgcttctatctggcggaaaccctgctggtgctggatcatcaacgcggctcggcccgtctgcaggccagcgtcttcagtgagcaggcgagtgaagcgcagcgtttgcagcaccgcctggaacagctgcaggctgagttgcaacaacccccgcagccaatcccgcaccaaacgctggaaaacatgcagctgagctgtaaccagagcgacgaagagtacggcgcggtggtcagcgagctgcaggaagcgatccgccagggcgagattttccaggtggtgccgtcgcgccgcttcaccctgccgtgcccggcgccgctggcggcctaccaaacgttgaaagacaacaaccccagcccgtacatgttcttcatgcaggatgatgacttcaccctgttcggcgcttcgccggagagcgcgctgaaatacgacgcgggcaatcgccaaatcgaaatctacccgatcgccggcactcgcccacgcggccgccgcgccgatgggtcgctggatttggatctcgacagccgcatcgagctggaaatgcgcaccgaccacaaagagctggccgagcacttgatgctggtcgatctggcgcgcaacgatctggcgcgcatctgccaggccggcagccgctacgtggccgacctgaccaaagtggatcgctattcattcgtcatgcacctggtttcccgcgtggtgggcaccctgcgcgccgatctcgacgtgctgcacgcctaccaggcctgcatgaacatgggcaccctcagcggcgcgccgaaagtgcgggcgatgcagctgatcgccgcctccgaaggcacgcgccgcggcagctacggcggcgcagtgggctacttcaccgccaccggcgatctggatacctgcatcgtcattcgctccgcctacgttgaagatggcatcgccaccgtgcaagccggcgccggcgtggtgctggattccgtcccgcaggcggaagccgacgaaacccgtaataaagcccgtgccgtgctgcgcgccatcgccactgcgcaccatgccaaggaggtgttctgatggccgatatcctgctgctcgacaacgtcgactcctttacctacaacctggtcgatcagctgcgcgccagcggccaccaggtggtgatttaccgtaatcagatcgccgccgaggtgatcatcgagcgtctgcaacagatggaacagccggtgctgatgctgtcgcccggccctggcgccccttccgaagcgggctgtatgccggaactgctgcagcgtctgcgcggccaactgccgatcatcggcatctgcctcggccaccaggcgatcgtcgaagcctatggcggccaggtcggccaggcgggcgagatcctgcacggcaaagcctcggcgatcgctcacgatggcgaaggcatgttcgccggcatggccaatccgctgccagtggcgcgctaccactcgctggtcggcagcaatatcccggccgatctcaccgtcaacgcccgtttcggcgaaatggtgatggcggtgcgcgacgaccgccgccgcgtgtgcggcttccagttccacccggaatcgattctgaccacccacggcgcgcgcctgcttgagcagaccctggcctgggcgctggcgaagtaatataaggaacacgacgatgcaacctattcttgagaaactgtaccgcgccgagtcgatgagccagcaggaaagccaacagctgttcagcgccatcgtgcgcggcgagctggagccgagccaactggcggcggcgttgatcagcatgaaagtccgcggcgagcgcccggaagagatcgccggcgccgccaaagcgctgctggacgacgctcagccgttcccgcgccctgactatctgttcgccgatatcgtcggcaccggcggcgacggcaccaacagcatcaatatttccaccgccagcgccttcgtggcggcggcgtgcggcgcgaagatcgccaaacacggcaaccgcagcgtctctagccgttccggctcttcggatctgctggcggcgttcggtatccgtctggatctgccggcggaagaggcgcgcaaggcgttggacgatcttggcgtgtgcttcctgttcgcgccgcagtaccacaccggttttcgtcacgccatgccggtgcgccagcagctgaaaacccgcacactgttcaacgtgctgggcccgctgatcaacccggcgcgcccgccgctggcgctgatcggcgtttacagcccggaactggtgctgccgattgccgaaaccctgcgcgtgctgggttatcagcgtgcggcggtggttcacggcggcggcatggacgaggtggcgatccacgccccgacgcacgtggcggaattgaacaacggcgaaatcagtagctaccagctcacgccgcagtccttcggattggaaacctatccgctggaagccttgctgggcggtacgccggaagaaaaccgtgacattttggcgcggctgttacaaggtaaaggcgagccggcgcacgccgcggcggtcgcggccaacgtcgcgttgcttctgaagttattcggacatgaagacctgcgccaaaatgcgcggcaggcactggatatgatcaacagcgggcaggcctatgagcgtgtcatcgcactggcggcaagaggataaatgatgcaggaaaccgtgctacacaagattgtccgcgacaaagcgcaatggatcgcggcgcgacaacagcaacagcccctggccggctttcagaacgacatcgtgccgagcgaacgcagcttttatcacgcgctgcagggcacccggacggctttcattctcgaatgcaagaaggcctcgccttccaaagggctgattcgcgaaaactttgatccggtagaaatcgccacggtgtataaagatttcgcctcggcgatctcggtgctgaccgacgagaaatacttccagggcagcttcgatttcctgccgctggtcagtaaaaccgtcagccaaccggtgttgtgcaaagactttatcatcgatccgtatcagatttacctggcgcgctactatcaggccgatgccatcctgctgatgctgtcggtgttgaccgacgaccagtatcgccagctggcggcggtagcccacagcctgaatatgggcgtgctgaccgaagtgatcagtgaagaagaactgcagcgcgcgatcgcgctggaagcgcgcgtggtcggcatcaacaaccgcgatctgcgcgatctgagcatcgatctgaaccgcacccgccagctggcgccgcgcgtgccgcatggcgtgacggtgatcagcgagtcaggcatcaacagctatgggcagatccgcgaactgagccattacgccaacggcttcctgatcggcagcgcgctgatgtcggaacccgatctgcgcgccgccgtgcgccgcgtgatcctcggcgacaacaaagtatgcggcctgacccgtccgcaggacgccgccgccgcctatcaggccggcgccatctacggcgggctaatcttcgtcggccgttcgccgcgctatgtggacatcacccgcgcccgcgaagtgatctccggcgcgccgctgaagtatgtcggcgtgttctgcgacgcccagctcgataccgtggcgttgaccgttgagcgcctcgggctgcatgcggtgcaactgcacgacgcggaagaccaggcctatatcagcgccctgcgcgcccgtttgccggccgattgccgcatctggaaagcgctgagcgtgaaagatcgggtgccggcgcgcgatctgcagcatgtcgatcgctatctgctcgacaacggcgccggcggcaccggccaacgcttcgactggtcggtattgcaaggcgaagatctgactaacgtgatgctggcgggcggcctgcgcgccgacaactgcgtcgaagcggccaagctcggctgcgccgggctggacttcaactccggcgtggaaagcgaaccgggcatcaaagatcccgcgcgcctggcctcggtcttccagaccctgcgcgcctactgaatacggctctatattaataacggataataacgggaactctcatgacgctgcttaacccctacttcggcgaatttggtggccaatacgtgccgcaaattctgatgccggccctgaaacaactggaagaagcctttgtcagcgcccagcgcgatccggcgtttcaggcggaatttatcgatctgttgaagaactacgcgggccgcccgacggcgctgacgctgtgcaaaaacctcactgccggcagcaacaccaagctttatctgaagcgtgaagacctgctgcacggcggcgcacacaagaccaaccaggtgctgggtcaggccttgctggccaagcgcatgggcaaaaccgagatcatcgcggaaaccggcgccggccaacacggcgtcgcgtcggcgctggcctgcgcgctgctcggcctgaaatgccgcatctatatgggcgccaaagacgttgagcgccagtcgccgaacgtcttccgcatgcggctgatgggcgcggaagtgatcccggtgcacagcggctccgctacgctgaaagacgcctgcaacgaagcgctgcgcgactggtccggcagctatgaaaccgcccactatatgctcggcaccgccgccggcccgcacccgtaccccaccatcgtgcgtgaattccagcgcatgatcggcgaagaaaccaaagcgcaggtgctggagcgcgaaggccgcctgccggatgccgtcatcgcctgcgtcggcggcggctccaacgccatcggcatgttcgccgattttatcgatgacgccgaagtgggtctgatcggcgtggaacccgccggtctgggcatcgaaaccggtcagcacggcgcgccgctcaagcatggccacgtcggcatctacttcggcatgaaagcgccgatgatgcagaccgccgaaggccagattgaagaatcctattcaatctccgccgggttggacttcccgtccgtcgggccgcagcacgccttcctgaacagtatcggccgcgccgaatacgtgtcgatcaccgacgacgaagcgctggaagcgttcaaggcactgtcgcgccatgaaggcatcatcccggcgctggaatcctcacacgccctggcgcacgcgctgaaaatgatccgtgaaacgccgcagaaagaacagatcctggtggtcaacctgtccggccgcggcgacaaagacatatttaccgttcacgacattttgaaagcacggggagaaatctgatggaacgttatcagcaactgttcaaacgcctggaaagcaacaaggaaggcgccttcgtcccgttcgtgacgctgggcgatcctaatccgacgctgtcgctgcagattatcgacaccctgatcgaagccggcgcggacgcgctggagctgggcatccccttctccgatccgctggcggatggcccaaccatccagagcgcgacgctgcgcgctttcgccgccggcgtcacgccaacccagtgcttcgagatgctggcggccatccgccagaagcacccgaccattcccatcggcctgctgatgtacgctaatctggtgttccataaaggcatcgatgcgttttaccaacgctgcgccgaagtgggcgtggattcggtgctggtcgccgacgtgccgtttgaagagtctgcgccgttccgcgccgccgccgctcgtcacggtatcgcacccatcttcatctgcccgccgaacgccgatgacgatctgctgcgcgaaatcgcttcgcacggccgcggctatacctacctgctgtcgcgcgccggcgtcaccggcaccgaaagccgggcgcagctgccgctgcatcacctggtgaacaagctgcgcgagtatcacgccgcgccgccgctgcagggcttcggcatctccgagcccgagcaggtgaaggccgcgctgcaggccggggccgccggcgcgatctccggctcggccatcgtcaaaatcatcgaacagcaccatgccaacccgacggagatgctgaccaggctggcggccttcgtcagcaatatgaagcgcgccacccgggcgtgatcctctccagcgagcgccccgccggcgctcgctttaacagcttgtttcccctcaaagtttgttccatttatttacagcaaaaatttgaacaaacgcaggtcttgtctcacaatgaactttgttcgctatgcatttcttcgtttgatttggggaatgcgctcgctgcggcgaaaaaccgtacgagtttcaaccataacattgcatggagagtaatttatgaagctttttaaaaccctttcggccttgtgcatggccgccgttgtggcggtcgcggtgagcgcttgcgcgccgacggcgaaatctgagggaacgggcggttatatcgatgacacggtgatcaccaccaaagtgaaatcggcactgctggcggataaaaacatcaagtcacgtgagatcagcgtggaaacctttaaagggcgcgttcagctgagcggtttcgtgacgtccagcgatgacgccaatcgtgcggtgcaggtcactcgcggcgttgccggcgtgaaatctgttgaaaacgtgatgcaacttaaataataccgacacagggaggcgcaacgcctccctgtttgtggccttcatcagaagcggtaacccgccccgaacatgaacacccacggatccagacgcgtatcgaagctgtggtgcccaccgttcgcatcgttgaagcgagttttggtttcgatgttcatccaccacaccgacatgttcagcatccagtgctcatccaggttgtaatccaggccggcctgcgccgccacgccccaggaatctttcagatcgaggttgctcaacccggcgcttttgccgtagtcattgaacttctcgtcaaagaaagtggtgtagttaacgccgacgcccaggtaaggacgcagcttatcctgcttgtcgccgaaatagtattgcgccatcagcgtaggcggcagttggtgaacggtcgccaaatcagtgccgcccagcgtaaccttgtggcggaatggcgtcgcggccaacaactcaacgccgatgttgtccgtcaccatgtaaccgaaggtcagaccgagctgggtgttgtttttcgcatccagcgaacccaaccccaacacgttgtccgaacctgcatttggacgcaccgtcgcggtgcccgcgcggaacaggaaatcaccggcctgatgcgcacttgccaacataggcgccatcatcgtcgccaataccatcagagttgtctttttcattatccattccatttgtgtggttaatcgctcgagggggaatatacctactttcgggtatttgtgatcccatcgagatcacatcttatgtgtaaaaatttaaaatcccactaaaaacaaggttacctaaccgtctaataaatcaaggattgatctgcatcaaaaaatcgattttgttgcaaattatctacatgttcaaatttctgttgcggagaaaaatgcggctgaggtaatttcattttccgtgttggttttggttggtgccgtgaggagtcggtgggcaatcaagatgagcgaaatccttaatccctgtgtcagctgcggcgcatgctgcggttattttcgagtgtcattctattgggccgaagccgaagacggcggcggcaccgttcccctttccttaacagagcctttgaccccgttcctgcgctgcatgcaggggaccaacagcaagtccccccgctgcagcgcgctggacggtgaaataggtaaagccgtttcctgctcgatctaccttaatcggcccagcccgtgcagggagttcgatcagtccggtgaaaacggcctgcgcaacgaagcctgcgatcgcgcccgcgaacgctacggcctgccgccgttgccggtgaccttgccgctttcgctgcctgagacgacgatcgttgaagaaataggcgtagtgcaattcgcggggtgccacagcggcgtggaacagggtacaatcacccactgatttatctctgttttcccgacgccaaggagtctgcatgcctatcacggccaacgctttgtaccgtgacagttttaactttttacgcaaccaactggccagcatcctgatgctggcgctgttgacggcgtttatctccgtgctgctgaatcaggccttcagccctgatgccgaacagttggcgacgctcgctgccaccaccagcgatttcgcctcgtctaccggcatgggcattcaggaagtgatccagcagatgacgccggaacagcagatggtgttgctgaaagtgtcggcggccgccaccttctctgcgctggtcggcaacgtgctgctggtcggcgggatgctgacgctgatccgtctggtgtcgcaagggcaacgcaccagcgccctgcgcgcgctcggcgcctcggcgcccgacttgccgcgcctgctgctgctgctgtttatctgcaccctgctgatccagctcggcctgacgctgtttgtggtgccgggcgtgctgatggctatcgccttcgcgctggcgccggtgatcgcctccgtcgataaaaaaggcgtgttcgcttcgctcaagctgagcagcaaattggccttcgccaatgcgcgcgtgattgtgccggcgatgatgctgtggctggcggctaagctgctggtgctgttcctggtgagccatctgtcggtgctgacgccgaacgtcgccagcgtggtgctgaccgcgttgagcaacctggtctccgccctgctgctgatctacctgttccggctgtatatgctgctgcgcggctaacgccggcgtaagcaaaaaccaaggggcacgcttcggcgcgccccttttttgtttaccccaccacggcggcttccgcctgctccttactctgaatcagcttcagcgccaggtacagatccggcaccaaaatcaactctttatcgcgtcctaagcggttgatgcggaaccaacgcgtcagttcggtgcgacgccccgccagcaccagccttacgttacgctgtaacagatcgcgtttcagttcatcgatggccgccagcacgctgatatcggcatgggtaaaactggccaccgcatccaccaccacccaacgtggctggaacggcgtgccgtcgaccaaattgaggatacggcgtttgaaatacgccacgttgaaataggtcagcggcgaattgaagcgatacatcatgacgccaggtaccgccttcaccccattgttattgcccatggaatggatcataccttcatcgttgacgcccagcagttgttccgtcggccggaagacggtgcgcagaaactgcatcagccccagcaacaccgccagcccgatgccgctgatcacgcccaccagcagcacgctgaggaaggtaaacagcgccaagcggaacgcctgcgcgttgcgacggcgcaagatccagataccgcggatgtccagcagcgaccaggccgcatacatcagcaccacacccaatcccgccacaggaataaactgcagcggcgccatcaggaacagcaagacaaaggcgatgacagcggcggcgatgatcgacaccaactggctcttgccgccgttggcgtcattcaccgcggtgcgagaatctgcgccgctgatggcgaaaccttgcgacagcgcagagacgatattcaccagtcccagcgcgcgaaactcagcgtcagcgttcacctcataaccgtttttggcggcgaagctgcgggcggtgagcatcatgctgacaaagctcacgaccgccaggttaagcgccgggatcaccatatcgcgcagcaaaccaggctggaagtccggccactggacgatcggcagcacgccgctgaaaccgcccaccgtcaccacgccatgctgctgcaggccgcccgcccaggtcacgaacgccgccagcacgatagcgaacagcggcgccggccaattaggccgccattttttaaatccaagcagcgtcaccagcgtcaacaacgacaccgccatcgtcagccagtcgctgtgcagcaggttaccgggcagcgcgtagatgcgctcgatcaactgtgccgggcgcatcgtaaaccccaacaccttgccaatctgatcgacgataatggtgatcgccaccccgttcagcagcccgctgaggatcggccgcgacagcagatccgccagcgcccccagcttgaaccggctggccagcaggcaccaaccgcccatcatggcggtcatcatgatggtcaattgccaatggcgttccatattgcccgccgccagtggcgtcaccaccgcggcgatcaccgcacaggtggcggcatcgggcccgacgatcagctggcgtgacgagccgaacagcgcataggccaccatcggcaagacgcaggaatagagccccaccaccgggctggccccggccaactctgcgtaggcgatagccaccggcaacgccacggcggcgacggaaagaccggcgcgaatatccggcttgagccagctgcgttgatagcccaataaatgcgtcaaaccaggcgtcagggcctggagagatttccactgcatgctgttttccgcggtaaattatctggttattatgacgcttactatgcggcctgcggcccgcgctggcaatgcgcccgcgctttcttgcgtaagtttatgcaaattcctgctttcgcggcagaaatccgccggccaaacgccgataatcggcaacgcccggcggtacacagagctcgccgaatccggtatagtcggccgatgaacagatgatggattgatttatgaagcagtttcttgatttcctcccgctaattgtctttttcgctttttacaagctgtacgacatttacgtcgcttccggcgcattgattgtcgccaccgcgctggcgctggtgttcacctgggtgaaataccgcaaggtcgagaagatgacgctgatcaccttcctgatggtgctggtgttcggcaccctgacgctggtgttccacaacgatttgttcatcaaatggaaggtcacggtgatttacgcgctgttcgcgctggcgctgctgatcagccaatgggtgctcaaaaaaccgctggttcagcgcatgctgggtaaagagctgacgctgccggacaaagtgtggagcaaccttaacctggcctgggcggtcttcttcctggcctgcggcctggcgaatatctatgtcgccttctggctgccgcaaagcgtctgggtcaatttcaaagtctttggcctgacggtgctgacattggtcttcaccctcctcagcggtatctatatttaccggcacatgccggaagaacagaaaaaatagttacaaaattgttaatgcctgcggcgcttgccgcgggcagtatgatgttattccctccttttaaaagcagactgctatgacacaacaacgacctttacccagcggcgagctggtgctgcgcacgctggcgatgccggccgataccaatgccaacggtgatatcttcggcggctggctgatgtcgcaaatggacatcggcggcgccatccaggcaaaagagatcgccgaagggcgcgtagtgacggtacgcgtagacggcatgaccttcctgaaaccggtggcggtaggcgacgtggtttgctgctatgcgcactgcatccgcaccggacgcagctcgatcaccatcaatatcgaagtgtgggtcaaaaaagtctcttccgccccgatcggccagcgctaccgggcgaccgaagcggtgttcacctatgtggcggtcgatgcggaaggcaactcgcgcgcgctgcctgagggcaaaatgaatttccgcgtcggcttcgaagaataaactgacgctacactgcaaatgcaaaaagggtcgccgaggcgaccctttctttttggtatgaccaaactcagttcaattcggtggtgccgttcaacttgaagcggatagtgacggtgcgatctttcgcttctttggcttcatagcgccatttgcgcatcgcctgcttcacttcacgttcaaacatgttgcgcggttcggccgacaagatacgcacgttgctgacgcgcccgtcgctgtcgatatcaaactgcacccgcacgctgccttcgatctgtaaagcctgggcccgcggcggatagagcggattggcgcggctgatcggccttgggccgagctcgcgcgagttgccctgcaccggcgcggcaggcgcctgtttcaccggcgctttgtcgatcggcttggccggcgagtcgttgttgaacggcgacggttcgcgcggctcgacttttttcggctccggtttcacctgtttttcgaccttcggcttcggcttgggtttcggtttcggcttgaccggctccggcttcacaatcgccttcggcggcggctccacaataggttccggttctggctccggctcaggttcgacctgcggcggctccggttcggcctgtgccggcggcggcggttcggccatcgcggcggtattgaccatcatgacgctgatcggcgcgtcctctggcttcggcagctccaccacttcttttaccgaagcgtaaagcaatcccgccaccagggcgctgtgaaggcctacggacaagacgaaaggcacggatatacggcgattaaggaacatcttttttagcggcataatgattctgtttcctctggttcgccaagtttaaatgcaaatagcaatcatattcaataacgaaaggcaaactatcgctttaatcgtcagtatgcgcggcgaaaaccagcaaactcataaggatattaacctggccgttgtttttttaccgccggggcgacacgctttattaacgtctggccaggcgtcaaaaagtaaaaaacccgccggagcgggttaatttcggtgagtcagcgttattcttcatcgccatagtaaagcacgcccagcttgatcagcggccgcccttgcgccttacggtgcaggttggtgtcgcgcagcgaatagacgcagccgcagtattcctgctgatagaagcgttcgcgcttgctgatctctatcatgcgcgacgaaccgcccttcttgcgccagttgtaatcccagtacaccagatcggggtacttttccgccgcacggatgccgcagtcggtgatctgctgcatgttcttccagcgcgagatgcccagcgagctggagatagtgtcgtaaccatgctcatgcgcatacagcgccgtgcgctcgaaacgcatatcaaaacacatggtgcaacgaatgccgcgctccggctcattctccatccccttggcgcgggcgaaccagttgtcggtgtcgtaatcggcatcgataatcggcaccccgtgctgctcagcgaaacggatgttctcttctttacgcagcagatactctttttgcgggtgaatgttggggttatagaagaaaatggcatactcgatcccggaggcctgaatcgcttccatcacctcgccggaacagggcgcgcagcacgaatgcagcagcagtttgtttttgcccgccggcaaatcgagtttttcccttaccagttccgtcatgtcctcacctcaatggcatatcagtttaagcgcgccgcactatacgaataaaaagtagcggcttcaaggcataagcgccaatccgccgggaaattcgccctatgccgttcccctgccgcgccttttgcgctaccttggtagcaccgttttatagccatgattttaaaggtgaaacatgctttatctgatctacgcgcaagacgtccccaattcgctggaaaaccgtctggcggtgcgcccggcacacctggcgcgcctgcaggcgctgcgcgacgccggccgtctggtggtcgccggccctaacccggccatcgacagcaacgatcccggcgccgccggctttaccggttcgacggtgatcgccgaattcgcctcgttggcggaagcccaggcctgggcgcagcaggatccctatatcgccgccggcgtctacgccgacgtgacggtgaaaccgttcaaacaggtattctgacctcattagctgaccgggagcggcgcaccgttcccggatcaatgcgtgctctcgcccgctcccgtcggtagaaaaaatgccttccctccaggggctgtcgcaccgcccgcctatactctcctgaaccagcggcatcgccgcgtactccgggagatcgaccgatgcgactcgatgttcacgctcacctgtggagcactgagtatctggatcttttgcaatctcatggcctgcacgaagtcgccgcctatcggcaattgggcgccggccgcagcgatcgcgagctggcagcccgcttcgctctgctggacagcgccggcatcgacatgcaaatcttgtcggcgacgccgctgtcgccgcacctggaagacgagcaggcggccgttgatgccgcgcgccggatcaacgatgaatatgcggagctggcagcgcgttatcccgcccgcttccgggccatcgcttccttgccgctgccgcatatcgacgctgcgttacgcgagctggacagagccttgacccagctcggcatgctgggcgcgtgtatcaccacctcggtgctcgggctgtctatcgccaacccactgttcgagccgctctatcaggaactcaaccatcgccgcagcgtgctggccattcatcccgctggccgcggcgcgcactcgccgctcatcgccgattacgctttaacctggtcgatcggcgcgccgatcgaagacacggtcgccgccatgcactttatcctcaacggcatcccccaacgctttgcggaaatgaaaatcattgtgccacacctgggcggcctgctgccgatgacactggaacgcctcgaccaaaccgtcgcgtgggaagcgccgaatacgccggaacccccgagccgcgccgccctgcgcatgtggtacgacacggtaggccacgatcaggtgcccgcgttgcaagcggcggcagcgacgttcggcacagagcggctgttgttcggcaccgatttcccgttccagccgggcgaactgtttcaaaccacggtggactacgtccggcgcgcgggattgccggaggaagacgtgaacgccattttggatcgcaatgcggctgcgctgtttgggctgggtgcggactgaagatccgtcctcattcagtaacgggcaggagactccattccggccccggatttcggttagctcaagtgggctttatacggttctttcacgttgtgcttcacgcaggacagcgacagccgcgcaaaacgctgcgtcctcaatgtcgcacatcccccgtaataacgggatgtgcgacatgtcgtgaaccggtcaatgttgggaaactgcgtcagacctgtcgcaggtaaacatccgtaatgcgcaggtcaaagttgcttttcatttcggtgacgtcaataagcaagaaagcgtgcgtagcccagtccggcgctcgctcgaaggcgggaggctgcgtaggataaccctgcatttggcctgggatgataacgctcttcagatcggattcattgccgctaaattgataggtgtaaacgtgaccggtttgctgcttgagaatttggggttccacgtcttgttgcggaccatattcgcgcagcttcgcccataggattttgacctggcagcgttgcccatcacccgcgtaagtgttggcgcgaacatggtgaataacgctgccgtaacctttcaggctgatggttcccagcaccgcctggaacacaccattaccagcggccgcgttgcgccccaatgaaacgaaaccggcctggcgaataaggctgaaattggtgctgttagtcgtaccccacccgtagcgagatttgcgtaccgtattaacgcctcccggcggcagaacccaaacttcctcagtccatttgtcgctaccgttgctatacgtcgtgccatccagccaattgtcctgtacggcggtatcggttcgcacctgagttaacagataaggccaggcgataggcaattgcgtattacgcaaagagacagagcccgtgccatcaatccaaccactgacgttggagtcaccaccttgttgcatctgaccgatattgaccttatcaaagaccactcgcgccaaatcacccacatagaatgggttagaggttgtcggataggccgttgggctaccgccggctttgaaggtaaacagaccgccgataacgttgactttgcaacttttggcatccgggatgttcaggatataattttgcgggccatagccttcaacgtgacaatcgcggaaaatatgttgccccccctcgatatgcatatactttccgacatggctggaggaggtttgcggcccgtttttaccataaatgtaatcgaaggaacagttgaagaaatagctgtagcccccctgtaatttcacaccgcaattgctctgagcgaaaatgcagctgtggaaattcatttcttcaccggagttggaagtattgtcggggaagtaatagcaaatgtcgcagtgattgaaactaaagccatacatgcgcaggaagtagaaatcggtagtgccggttatgccataggcaaaaccttcgatcccacccccgataaaggtcaacgaattgcgaccatagctagccgagagcgaagtagaaaacgtcatgccatcgacaaatgaattggcaccagggccaatcatacgcaaatttttcacgctgagattgccctgggtataaccggcgttgttttgccattgaatcgcgattttacgttcggtggcgttgccctgtgtcatggcgctaaaatccagcaaggcgccggagaaatcgtaatcgacggttttcaaatccagcttcagcgtttccgtacatttaaattgcccgctcccgaactgcagattcccgtttttcaatacgcgtgaaccgctggatacagcctgcgaactggcgtaatcgtgagcagcttgaatggcagcggcatcctctgaaataccgtcacctttcgcaccgaacatataaggcgacaccgtgccggcaacgtccaggacgcgcacccacaaccaagcggcgttggggcggatgaacatcccgccatcatccatcggtgtcgattgtgctttggcgacgaagataccgccgccgagaggctgacgattgccggcattccaatcgccgtaatatgcggtcacagcgatcaattcgccgactgcgccaggaagagtgtttcgtaacgtagcgatatcagggcaggtattcatcatattatcctcatagagttactgtatttatatacagccatataactctatgaacgaatgaaccgtgcatcaatagcgggagtgttgttctattgcccaccgaacataccggtctattggatggcctccttctgctccttttatcccctccatacaaggcagagacatgccgttacgcgacgagttttcctcgcaccaccaccttgcccggcttgatctcggggtcggcaatacgacggatcgccagattcaacgcttgccaggcgatctcttgcaagtcgtgtgacacgcacgggaaatgaaaaccgtagatctcggcatgtgaaacctcatcgatgctgaacagcgacacctcctgcatcaacggcagccgatattcgatgcaggccttgatgatgcccagagagatctggttattgcagccaacgaaaaagtccggggcacggtgattggccagctaacggctcgtctcttgccaggcgacgcccatcataaagaaactgttgttcggcaccgattttccattccagccgggcgaactgtttcaaaccacggtcgacgacatccggcgagcgggtttgccggaggaagacgtgaatgccattttggatcgcaatgcggctgtgctgtttgggttgcagaatgtgaagcggcccacataggtttggccgcgtttacggcacgatgtgttcaccgctctgaaaatactcaccgatgacgctttccagcaccgccaccgccggttggctggcggccgcggcagaacggagcagttgcacttcgtgtggtgtgaccgacggcaattcgtcgagtatccgcatcgccgccgaaacccgtgcgcggtcgagcagcgtgacggccaatcctgcctcgacggcagccgccaccacgctggccgaagggctgctcacaaccactcgccaacgccttcccgccctggtcaatgcatcgatcatagcctcacgataagggcaatcggcggcatgcaacgccagcggcagtggccggttagcctgcagcgccagcgaacggcctccggcccacaccggcgcagtcaccgcgagcggtgtctggcacggtttccccgagggttgaaccaccagcgcgagatgcagccgattacggccaacttgttccgccagcgcctgactggcagcggtagagacctccagttccaccgcgggaaaactgtcggcaaaccgcggcaaaatatggcgtatcacatgggaagcgtactcatcaggcaaccccaatttgatatggccgcttagcggcgcgccccgcagttcccgcagaatatcatcatgggcgctcaacagcccgagcgtcgaagccagcagcttgttgcccagcggcgtcaacgccacggactgattgtcacgctccagcaagcggccgcccgccacctgttccaggcgccggatatgcacgctcacggcggcggggctgcgattgacaaatgccgccgccgcgcgaaattgccccaaacgcgcaatagcgtgaaaagtgcgcaagagatcgatatccaatgtcggccgcatgatttaactccattaaacaactgaacgaaaattattcgatttattaaattatagccactcactaccatcgggcgtaaaggaggtgaccatcatgtccctgtcaccatttcgcccctcttcccaccgaggcaaagccgccctctggctggctgcggccgaggtcctgctgatcgtggcctggagctccggcttcgtcggcatccgcttcgccgccgatcacgcgccggtgttgctggtggcgttctggcgctgcgtggtggtcgcgttcgcgttgctgccgcttagtgtgcgtgccatcaggcgcgcatctccgctgacgatagctgttcacgccgggattgggttgctcgccatgaccggttacctgaccggcgtcagcaaaggcatcgaatatggcgtgccggccgggttggccgcgctcatcgccgatttgctcccgctcggcaccgcgctgctgagcatgctgttgcaacgccgcttgcccgatggccgcgtttggtccgggttagctctgggggttagcggggtaacgctggcgaccggcagcgccatctcatggggagatgccccattgtggagttacctgttgccgctggcggggatgttggcgctggcgctggcaacgctgtggcaggaacggctgccgcagacgcaagcaatgagtttgccatcctcgctggggatacaaagcgcggtttccgcgctggctttcgccgccatggccggcgcggaaggcccgctgctgccaacggtaacgacggggtttgtgatcggcgtgctttggaccgcgctactggcgacgctggccggctacggtctgtactggttttgtctaaggctcacttctgcgctgcgcgtgacgagcctgctgtttctcagccccttcgtcaccttctgctgggcagggttaatgttcaatgaacccctttcctggcccatgctgctaggcgcggcggtggcgggaagcggtttatggctgctaatccgtcccgccgggcgggatgagcccaaaacagcgcaacgcgctgagaaatgacggataaggcgaaaggcggcgccgttatgcgacgagttttccccgcaccaccaccttgcccggcttgatctcggggtcggcaatacgacggatcgccagattcaacgcttgccaggcgatctcttgcaagtcgtgtgacacgcacgggaaatgaaaaccgtagatctcggcatgtgaaacctcatcgatgctgaacagcgacacctcctgcatcaacggcagccggtgttcgatgcaggctttgataatgcccagggagatctggttattgcagccaacgaaaaagtccggggcgcggtgattggccagccaacggctcgtctcttgccaggcgacatccataaagaaatcggcatacagcacttcaaacgacgccactttcccttgcagcgccgcctgcagccctgtaaccctgtcccgtgcaacgttggagttctccggcccggacaccaccaccacccgctgcgctttctgttccagcagccagcgccccgcctgaaggccgcagtccaagttatcgatatacaccccgctgcagtggcgattgtccagctcacggtcgatcaataccaccgggatattcaatgtttccaaccgctttagataggaaggctggtacagatgatcgttggaaatgaccgagagaatgatcgcatcgacgttgtagccaatcagtttgtcgatgattctgtcttcgctttcctgagactcataggaatcgaacaccagggtgtcatatcccattttttgcgcttcaagcgtcatcaaccgcgtcaggccgccaaagaacgggttggccatatcagggttgacgatgccgatggttctgctgcttttcgcccgcaggttgcgcgccgcagcattgactacataaccgagttcggcagcggtctcccgaatgcggcgcagcgtttccggatgaaccttgtccggctgtgaaaatgcccgcgacgcggtgattttactgacgtttgcctgtgcggccacgctagccagcgtcgctttccgtcctcgccccaccgccaaatgcagctccttagcttaaagttatcattttgtaccattaacaacatcatgacagaactttcatcgtggcgctaatggtttacgcctgccagccggttaatccggggatcggtaaagatatccagctcgtcacggctctcggaagagaactcggacaccaccgccccccgctttccagcctgaaaccagtgccgggtattgggcgcgatggtgtattgttcgccaggccgcaagaggatatagcgattgcaggtataccactgctccgcgccttccggcacccggcataccagttcaccgccggcgtcattaagcgtcaggttttcatcgtcgacaaacagaaacacctcaccccaacggcagcgaaacgtctcttgcttgccgggcgtgccggcaaaaggaggatgcaaatgctctgggcaagtctgctcaggaaacagcaccaactctttcgcacaataccgaggtgagttgacataggtcagcagctgcagccctgagacaggatagtcggccaagccaaacgtcgcaatttcaatacgttgctgttcttcttcggtcagaacgatgtccgcctcgcgcaaatattccagcgtagcggctatggcacgttgttgtttgttcatcatttcccctgcaaagtaacggtatcgatatcagaatactgatattaaaaccgtcattacatcgccgattttgtgatcttcatccccatattgaataacaacccaccagcaaaattaactcccatcgagtaattccaacatcgatcacagtttaaccacccgctttagcccactatcgccgcattgaaatgatatcgttaccataaaaatgattcaccaggaggcaatatgaaagcattagtgttggccaaagcgggggaaatcgctattgaggacgtccagcttgccgaaacgctggggcccgatgatgtgcagataaaaattcattccgtgggcatctgcggcagtgatgtgcactattaccaacatggccgcattggcccgttcgtggttaacgccccgatggtgctcggccatgaagcttctggcgtggtgctcgcgacaggtaaaaacgtcactcacctcagcgtcggcgatcgcgtttgcatggaacccggcattccggatctcaactcgacgcagacgcgcgccggcatttacaaccttgacccggccgtgcgcttctgggcgacgccgccggtgcacggctgcctgcgcgaaaccgtcatccaccccgccgccttcacgttcaaattgccggacaacgtcagtttcgccgaaggcgccatggtggaacccttagccatcggcatgcaagcagccaccaaagccgggatcaaacccggcgatatcgcgctggtgatcggcgccgggccgatcggcgtggtcaccgctctcgcggcgctggcgggcggctgctcggacgtcattatttgcgacctgtttgacgaaaaactcgccgttgcggccagttatgaggggctgcacgccgtcaatatcaaaaccggcgacctggcggggaaagtggccgcgctcaccagcggcaatggcgccgatgtcgtgtttgaatgcagcggcgcaaaaccggccatcgctacgctggccgaacatgcggcgccaggagcgaccgccgtgctggtcggcatgccgatcgatgccgcgccgatggatatcgtcgccgcgcaggccaaggaaatcaccttcaagaccattttccgctacgccaacatgtacccgcgcacgctgcggctgttgagcagcggcaaattgcgcgtccagccgttgataagccaaacctacaagttctccgacagcgtggccgccttcgagcgcgcggcggcgggacatgcctcggacatcaaaatcatgctggaaatggagtgatcctatggcgctctatgctggcatagactgcggtacgcaaggcacgaaagtcgtgattgtcgacagcacacagggcgtgatcctcggtgagggcaacgcccctcaccgtctcatcagccaagccaatggccggcgcgaacaggaggccgactggtggattgaggcgctggtcatcgcttttcgccaagccgtgactaacgccggcgttgatgcacgggagattcatgctctgggggtctcgggccaacaacatgggtttgtacctctggacgcagacggcaacgtgctgcacagcgtcaagctgtggtgcgataccgaaaccgcagaggaaaacgaacggctcctgcagcagctcggcggtgccaacggctcgctggaaacactcggcctgcggatcgccaccggttataccgcgtcaaaaatcctttggttcaagacacaccatccggcgttgtgggcaaaactgcacaccgtattgttgcctcatgattatttgaacttctggctgaccggagagcgcgtagcggaatacggtgacgcttccggcaccgggttgttcgatgtgcgcacccgtagctggagcaaagccgccgtcgatctcatcgacgacagcggccgtctgtggcaagccctgccgccgctcaaaaacgcggagtgctgcatcggcacggtgcgccccgccgccgcggaaaaacttggcctcggcccaacggtgcgggtatcgaccggcggcggcgacaacatgatggcggccatcggttccggcaacatcgaggccggcaccctcaccctgagcctgggcacctccggcacgctgttcgcctggtctgccgcccccgtcgcggcggaatcagacatgattgccggcttctgctccagcaccaacgggtggctgccattgatttgcaccatgaatgtcacctcggccaccaccgcggtacaaacgctgctggacgaagaccttgccggctttaacggtttattggcgcaggcctcacccggcgcaggcggtgtcgagatgctgccgttcttcaatggcgaacgcgttccgccgctgcctcacgcgcgcgccagtctgcataacctcgatagcgacaattttacccgcgccaatctctgcctggcggtggtcgaaagcgccacctatggcctgcgctatggcatcgagctgtttcgccgtcagggcattgaagcgcgcgagatccgcctcaccggcggcggcgctcgcagcgccgcctggcgacaaatcgtcgcggacgtgatggggtgcccggtggtctgtctgaaagccaaagagaccgctgcgctgggcggtgccattcaggcgatgtgggcgacgacgttggccgacgatccgctgcggaatgccggcgcgttgctgtccgaactgtgccaacgtttcgttgcgctggatgaggccacacgcgcacggccacatgccggcagacgggcgcaatacgagacgctttatcaacggtacctgcaacgcttgcagcagacctacccggaggtgcaactgtgacgcgagatccccatacgcaagcgcccgcctacctgctggaggtcagcggcgtcagaaaagcctttggcccggtcgtggcgctcaagaatgcggagttttgcctgcggcgtggttccatccatgccctgtgcggcggcaacggcgcgggtaaatccacctttctcagcattctgatgggctttattcaacccgatggcggcgacatttttatcaatggccaacgctgtgaatttcatcatccccgggaagccctcaacgccggcatcgccatcgtgcagcaggaactgagcgcgatcccggatctgacggtggccgaaaacatttggctgggccgtgagccgagacgcctggggttcgtcgatttcgccacgctcaatcaacgcaccaccagcctgctcaaggaactcgatttcaagatcgacgcccgagagaaaatgcgcaacctgagcgtcgccgagcagcagctggtcgagatcgccaaagcgctgtcgcatgccaatgccgacatcatcatcatggatgaacccacctcggcgattggcgaggaggatgcgcaaaaaatctttcagacgcttcagcaattggcggcgaaaggtaaaggcattatttacgtctctcaccgtttgtcagagatatttcaaattgcggacagctacaccattttccgcgacggcgcctatatccatgaaggctatatcgccgacattacccgtgagcagttgatcgaacacattatcggcggcgagtacgacagcgagttcgccaaattcaatcagcccggcgaagaggtcttgctggaggtcaacggcctgtgttggcgcagcaagataaaggatatcagcctgcagcttaagcacggtgaaatcctgggcatctacgggctggtgggatcgggccgcagcgaatttctcgatcttatcttcggcattcagcatgccgacagcggcacgatccgtttgggcgacaagacgctgaaccgccattccccgcgagaggccatcgacagcggcattgcctacgtgacggaagatcgcaaggaaaccggcctggtgctgtgccgttccgtcagtgaaaacatcaatatcgcctcttttgccggcatcagccgaatggggttcgtcagcgagaaacgggagcaggcgcgaacccgcgacatgatccagcgcttcaacgttaaaacccacgatggcgaacagcccgtgggcaacctgagcggcggcaaccagcaaaaagtggtgctgggccgctgggcgctgctggatccggaggtgttgttgctcgacgagccgacgcgcggcatcgacgtcggcgccaagaaagagatctatcgatttatgtcggagttcgccttgcaaaacaaggggatcatcatggtttcctccgagctttcggaaattatcggcatgagcgatcgcatattggtgtttcgtgacgggcagttggccggtgagctttcggcagccgatgcgacccaggcagcactgatgaaacttgcggtttaacagagagagaaaaaaaatgagcagcgcccactccttatcaccaggaatttcatttttcacccgcaataagcgccgtatgcacaaatacggcattatcatcgccttcttcgcgctgtgcctgatcgtggcgctgattggcgaatatcaggtcgcccagggggcctggagcagcaattattttctcagcaatgaaaacaccctgatcgtcctgcgccaggtctcgatcaacggcattctggcgatcggcatgaccttcgtcatcattacggccggcgtcgatctctccgtgggctcggtgctggcgctaagcgggatcgtcgccgcccgcttcgccaccaacaacagcggattggctatcggcgacaccgcgaccgccgtcatggcgccgctgatcgtggcgctgggcatcgggatcgtctgcggcctggtgaacggcaccgtgttggctcgctaccggctgcaaccctttatcgtcaccatgggcatgctctctgcggcgcgcggtttaaccatgttgaccaccaacggcaatccggtttcgcaattgaacagcgatttccgctggttgggcaatggttatgtcggcggcgttccggtgccggtcattatcttcatcgtgctgttcgccctcgcctggctggtgctgaataaaaccctcttcgggcgctacatctacgccgtcggcggcaacccgaaaagcgcgcgcacctcggggattaacgtcacgcgcatcaaaatactggtgtatacgctgtgcggcgcgctggccggcatcgccggcctgatcctcaccgcacgcaccggttcggcgcagaccaacgccggcgcagggtatgagctggacgccatcgcagcggtggtgatcggtggcaccagcatggccggcggcgtcggtacgctggtcggcaccttcttcggcgtgctgattatcggggtgatgaataacggcctcgatctgctcggcgtgcaatcgtattaccaacaaattatcaaaggcgcattgatcgttcttgccgtcttgctcgacccatcgcgtaagcaacagcgcgattaataacatcagacccaactctaccaggagaaaaccatgaataagaccaagatagcgttgtttgcctctgccatgatgctcggtagcctgtcggcagctcaggccgccccggtaaaaatcgcggtattgatgtacggcaacaaagccgagttcgtgcaattgatggaaaggttcggcaaggagcacccggcggtgaaaagcggcgaagccgtgctgaccttctacgatgggcgttatgatgcctcggtgcaaaacgatcaggccgccaccgctatccagacgcgcgccgatgccattatcgtcaacccgatggattttgaggccaatatcgatatcgtcactaatgccaacgaagccaaaattccggtggtggtcaccaacgcgcgcctgaacacggacgcgatgacgtctgaagtagtgtctaatgacgagttggggggatacctggaagccaaagccgtcctggacaaactcgactgcaagaaccgaaaggtgaacgtggtgattatcgaaggcccgaaaggcggcagcggcgagatccagcgcggcaagggcaatgataaagcgattgccgagtgcggcgtcggccaggtcacggtacttgaacgtaaaacggccaactggtcacgcgcggaagcgcagccgctgatggaaaactggctgcagaaacaccggggcaaaatcaacggcgtgatcggccaaaacgacgagatggcgctgggcgctatcgaggcgatcaaaggcgccggcctgaatgtgaaggacttcgcgattgccggcgttgacggcgtttccgacgcgattcatgcggtgcaggccggtgaaatggtctctattctgcaagatgccaaaggccagatgcagggttccatcgacgtcgcgctgcgcgccgtgaaaggggaaagctatcaaccgcagtcggagatctggaagcaatatgccaaggatctgaaatgggagggcggcacgcaaaagcattactacatcccgtggaccgtcgttaccgcagagaacgcccagtcgctgttggacgcccgtaaataatttcccccgccccctgccttcagggggccccgctggggcgcttgcctgcaaacaaaaaaaagccagcacggagtggctggctaaaaagttcttcgagggaatatcttgtgcgataaacatacgcctttcactgcgggctttactagctatcagtgcgataggcaccctcagttaaaatcaacgcctgcatatcggtgaacatcgcttcccattccgcctgatcgatatccatcaaaccaaagtaacgcagcataaaggcgccttcggtggcgagaaacgccaggcgcgcgcgcttgccttcttccgtcgtcaaatccaaaccggcgatgcggctgcgataccattcgcgcgtgctcgccagatgctccggcgtttgaatcagcgtcgccatcagcccggcggccttggcgctggcggtctgatccgagctttgcgtcgccagcatatgcgcccgcacgccggtctgcggtgaaggatcgtcaccggcgatagcggcgaacagcgtctcgtaggcactgccccagcgatcgaacatggcgtcaatcagggcgtctttgctgccgaaacagtactgcaccccgcccttggagatccccatcgctttggcgacggcgtcgatggtcaaaccggcggccccctgagtggcgacgatctcttcggcggcgtccaaaaccttgtcgcgatcgatgctgcgttgacgtcccattaagaaacccttcttttcaatacgaacgtatggatatatattatcaccagtatatcatccggcatcgccggatgggttacccgaatggcggcgccttcgcgccgcctactttaactggattatgacttatgtacgccaagaaccgctggttgatcctgacgatggtcgccagcgccctgttcctgatcgtcatcgatatgacggtgctctataccgctctgccgcgtttaacccaggcgctggacgccagcgcctcgcaaaaactctggatcgtcaacgcctacccgttggtggtggccggtctgttgcctggcgccggcatgctgagcgatcgcatcggccataaacggctgtttctcgccgggctgccggtgtttgccgtcgcgtcgctgtgcgccgctttctcgcctaccgccgagtggctgatcgccgcgcgggtattcctcgccgttggcgcggcaatgatgatgcccgccacgctgtccatcgtacgccacgtctttaccgacgaacgcgaacgcgcgctggcgatcggcatctgggcgtcggtggcctccggcggcgcggccatcggcccggtggtcggcggcctgctgttggaatatttctggtggggctcggtgttcctgatcaatgtgccggtggtgttgctggtctggccgttggcatggaaactgatcccgcgctgcggcggcgataacccgcgccccgccgacatcgtcggctcgatacagatcatgataggcctggtcggcgctatctatgcgctgaaagaattgagcaagccggcgcctgacgtcagcgccttgctcgcggcggccctgatcggcatcctgttcctggcgctgttcgtgcgtcgtcagcagcgcagcgcccacccgatgatcgatttctctctgttccgcaaccggctgttcgctggcggcatcggcgtggcattgctgtcgatggtggcgctgatcggcgtcgagctggtgctcagccaacgcttgcaactggtgctcggcctcagtccgctgcaggcggcgctgttcatcttgccgatcccgctggcctcggcgttggcggggccgatggccggtttgctgctgccgcgctacggcgaacgcagcattatcctcggcggtttcgccctgaccgccttcggcattgccgccctcgccctgttgtctcagagcggcatagcgccgcagctggtgagcctggcgctggtgggcttcggcctcggcggcgtgatcaccgccgcttccaccgccatcatgctgaacgcgccggaggagaaatccggcatggcggcgtccatcgaagacgtctcctacgagctgggcggcgtgctgggcgtgacgctgctcggcgggctgatgacggcggtttacagccacagcctggcgctgccggcggagctgccggtcagcgatttagcctacgacagcatcgacgaagcgttgcgcctggcggccggaatggcggccgatcgcgcgcagcagttgacgcaactggcgcgtctggcctttgatcgcgcctttatttcggtactgatcgccgccgcgctgttaatggcgctgggcgcaggtgtggtaaaactggcgctgcgcaagtaaccgagaaaagcggcttttttcgcctgcggaacctgcgtaaactgattcggcaatttgctcggcggatttatcgtcatcggtttgagcgatggcaataatgcctgttatcgtatttaaccctgcgataaatccggttactgtaacagctatggaaattgattctgtctactatcggaacaaataatcaggagaagattattatggcaacggcaaagaaagcagcgaaaacccatatcggccttgacagtaaacaatcggcaaaactcgccgaagcgctcaatgcgctgttggcaaactatcaggtgctgtatatgaacgtgcgcggctatcattggaacattaccggcccgcagttctttgaactgcacgcgaaattcgaagagacatataacgatctgctgaccaaggtagatgagctggcggaacgtattctgacgttgggctcgcagccgcgtcacgctttcagcgattatctgaaaaccgccgacatcaaggaacacaccaacgtgaccgatgataagggcacgctgcgcggcctgttggaagggtattcaatcttgctgcaacagcagcgtgagctgctgacggtggcggcagacgccggcgacgaaggcaccgcgtcgctgatgagcgattacatcaaagagcaggaaaaacaggtctggatgctcaacgcctatttgggcaaataactcagatgccataacaaaacagtcccttacgggactgttttcgtttttaccactcgcaggataccgcaaacagcagcgcgcgccgatgctgatcgtccaggcggcgccgcacccggataatatggcgattgctgcacgactggcgttccagccagcgatgccgccgacgttggctctgccgcaacatgcgccagcggcccacttcatttctactgcgtctcataattccgtcactcgttcgtctaatgccaaccgcgggcattatagccctttccgcccgcgatccaagccgccgttatcggcggcacagcggacgccacgcgggcaaaagccgccctttcaatttcggcaagtgccttaacttcatcatatttatgcaacataagcgccgataaaaggtttcgccttgcccgatctgtgcgtacactcatcattggtggtttgcgaacgggatttttcgcctttatgacaacattttataccgtaatcagttggctcatggtgttcggctactggctgctgatcgccggcgtgacgatgcgcattttgatgaaacgccgtgcggttccctctgccatggcctggctgctggttatctatattctgccgctgttcggcatcgtcgcctatttatcgttcggcgaactgcacctgggcaagcgccgtgccgagcgcgccaaggccatgtggccgtcgaccgcgcgctggctgaaggaattgaaagagagccgccgcatcttcgccaccgaatacagtgaagtcgccgaaccgctgttccagctgtgcaaccgccgccagggcatcgacggcgtcaagggcaaccagctgcagctgctcaccactaccgacgacacgttgaaggcgctgatccgcgacatcgagctggcgcgccacaacatcgaaatggtgttctatatctggcagcccggcggcctggtcgatcaggtggccgaatcgctgatggccgccgcgcggcgcggcgtacactgccgcctgatgctggactccgccggcagcctgccatttttccgcagcccctacccggcgatgatgcgcaacgccggcatcgaagtggtcgaagcgctgaaggtcaacctgctgcgcgtattcctgcgccgcatggatctacgccagcaccgcaaggtggtgctgatcgacaactacatcgcctataccggcagcatgaacatggtcgacccgcgctatttcaagcaggatgcgggcgtcggccaatggatcgatctgatggcgcgcatggaaggcccggtggccactacgatgggcatcgtctatgcctgcgactgggagattgaaaccggcaagcgcattctgccgccgccgccggacgtcaacatcatgccgttcgagcaggaaagcggccataccattcaggtgatcgcctccggccccggcttccccgaggagatgatccaccaggcgctgttgaccgcggtctattccgcgcgcgagcagctgatcatgaccacgccgtacttcgtgccgagcgacgatctgctgcacgccatctgcaccgccgctctgcgcggcgttgaggtcagcatcatcgtgccgcgcgacaacgattcgatgatggtgcgctgggccagccgggcgttcttctccgagctgctggaagccggcgtgaaaatctatcagttcgaaggcggcctgctgcacaccaagagcgtgctggtcgacggccagctcagcctggtcggcaccgtcaatctggatatgcgcagcctgtggctcaacttcgagatcaccctggtgatcgacgacgacggcttcggcagcgatctggcctgcgtgcaggaagattacatcgcccgctccaagctgctgaacgccaaagagtggttgaagcggccgttctggcatcgcctggtcgaacgcctgttctactttttcagcccgctgctgtaaaagccgcagcgagcgtgctttaataacgccaaatcatttgttatcaggatttttttatggatttgaataaccgccttaccgaagacgaaacgctggaacaggcctacgacatcttcctcgaattggccggcgacaatctggatccggcggatattctgctgttcaatctgcagtttgaagagcgcggcggcgcagaactgtacgacccctccgaagactggagcgagcacgtggattacgacctgaatccggacttcttcgccgaagtggtgatcggtctggcggacagcgacggcgagccgatcaacgacgtgttcgcccgcgtgctgatctgccgcgagaaagaccacaagctgtgccacattctgtggaaagagtgattcgccgctcatatttcggataaaaaaagccccgctgagtcagcggggctttttgttgccggctagcggcgcattacagcggatcgaccttcaggcatgaaaccgcatgacggaaactgccctccagcagcggacgcgtcttggcgcactccggcccggcgatcgggcagcgggtgcggaacacgcagccggacggcgggttgatcggcgaaggcagctccccttccaacagctggatctgcttttccttctccttgtccggatccgggatcggcaccgccgacatcaacgccttggtgtaagggtgctgcggattgtggtacacctcgtcataggtgcccagctccaccgcatggcccagatacatcaccagcacgcgatcggaaatgtgcttcaccaccgccaaatcgtgggcgataaagatcaatgacaggcccatctcgcgctgcagctgctgcagcaggtttaccacctgcgcctgaatcgacacgtccaacgcggaaaccggctcgtcgcagatcaccagcttcggttcgaggatcagcgcgcgcgcgatgccgatgcgctggcattggccgccggagaactcgtgcggataacggttgatcagattaggcagcaggccgaccttcagcatcatcgccttgaccttgtccttcacttcctgacgcggcattttcgggtagtaggtgcgcagcggctcggcgatgatttcgccgatggtcatgcgcgggttgagcgaagccagcggatcctggaagatcatctggatatcgctgcgggttttgcgccagtcggcgtcgttcatgcccagcagatctttacccagccaggcgacgcgcccgctggtggccttcaccaggccgatgatggcgcgcgcgaaggtggatttgccgcagccggattcgccgaccacgcccagggtttccccctcgaacaaccgcagcgtaacgccatcgaccgccttcagggttttcggcggctgccagaaccactgcttgtcgtcatgaatgtcgaagtgcactttcagatcggccacttcgagcagtactttcttgtcggttaccgctgtcataccaacgcctccaccggtttaaagcaggcgcgcaggcgcccttccccaaattgctccaatggcggagcgctcgcgcactgttccatggcgtacgggcagcgcggctggaacgggcaacctttcggcagccgcagcaggttcggcgggttgccgggaatggtcagcaacgcttcgccttcggcgtcgaggcgcggcaccgcgttcaacaacccgatggagtacgggtggctcggctggtagaacacctcgcgcgcgctgccgtattccatggtacggccggcgtacatcaccagcaccttgttgcagatgccggccaccacgcccagatcgtgggtgatcatgatgatggcggtgttgaactcgcgcttgagctcgttgagcagcgtcatgatctgcgcctgaacggtcacgtccagcgcggtagtcggctcgtcggcgatcagcagcttcggccggcacagcagcgccatggcgatcatcacgcgctggcgcatgccgccggaaaactcatgcggatacatgcgcatgcgcttgcgcgcttccggcattttcaccgcgtcgagcatgcgcaccgactcttcgaaggcttcgcttttgctcattttcttatgcagcatcagcacttccatcagctgttcgccaacgcgcatatacgggttgagcgaggtcatcgggtcctggaagatcatcgagatctcttcggcccgcagcttgttgagctggttttccggcaggttgaggatttcgcggccgttgaatttggccgagccgccgatgcggccattactggccagcaaccccatcagggcgaacgcggtctgcgatttgccggagccggattcgccgacgatgcccagcgtttcaccggcgcgcagatcgaagttcagatcgttcaccgccgtcacgtcgccgtccggggtggaaaacgtgacgcgcaggtctttcacgtccagcagcggcgacgctttaacgccgacggcggtttgcatctcaggatgttcaatggtgctcatggtggcactccttaacgatctttcgggtcgagggcgtcacgcaggccatcgccgatgaagttgaaacagaacagagtgacaaccaggaaacccgccgggaacagcagcaaccacggtgaaacttccattgagttggcgccgtcgctgagcaatgcgccccagctgctcagcggctcctgcgtacccagccccaggaagctgaggaaggattcgaacaggatcatgctcggcaccagcaacgaggcatacaccaccaccacgccgagcacgttaggcacgatatgccgcagcacgatgttgcgcgtggaaacgccgcacaccagcgccgcttcgatgaactccttgcgcttcagaccgagggtttggccgcgcacgatacgcgccatgtccaaccacgataccatgccgatcgccacgaagatcagcaggatattctggccgaagaaggtcaccagcaggatcacgaagaacatgaacgggaaggagttgaggatctccagcaggcgcatcatcaccgagtcgatcttgccgcccagatagccggacatcgcgccgtacagggtgccgacgatcaccgccactagggccgccgccacgccgaccatcagcgagatgcgcccgccgatcgccacgcgcaccagcagatcgcgcccggaggagtcggtgccgaaatagtgccccgattcaacgctgggtgcggcggacatcatcgcccaatcggtatcgtcgtaggcgaattgcgacagcatcggcgccagcaccacaaacagagtgatcagcgccagtatgaacaggctgctgaccgccgcgcggttgtgcataaaacgccgacgcgcgtcttgccacaggctgcgcccttccacttccagcttctcgctgaagtgttccagagcttcgctgttctttttagtcaacatcattcgcgtgctccagattaataacggattttcggatcgatgaccgcatacagcacatcgacgatcgcgttgaacagaatggtcagagcgcccaccagaatggtcaggctcaacaccagggagtagtcgcggttcagcgcgccgttaacgaacagctggccgatccccggcagaccgtagatggtttcgatcaccattgaaccggtgatgatcccgacgaacgccgggcccatgtaggacagcaccggcaacagcgccggcttcagcgcgtggcggaaaatgatgcgacgcatcggcaagcctttggcgcgcgcggtgcggatgaagttggagtgcaacacttcaatcatcgagccgcgcgtgatacgggcgatgctggcgatataggccagcgacaacgccaccatcggcaagatgatgaacttaggcgcaccgccgttccagccgccgcccggcagccatttcaacgtgatggcgaagatcagcaccaacagcggcgccaccacgaaactgggtatcaccaccccggtcatggcgaaccccatcaccgtatagtcccatttggtgttctggttcagcgcggcgatcacaccggcgctcacgcccagcaccaccgccagcagaaacgcggccagaccgagtttggcggagaccgggaaagagctggccaccaaatcgttgaccgaataatccttgtatttaaaggacgggccgaagtctccctgcgcaagctgcgccagataatgaccgtactgtttccagatcgggtcgttcaaatgatatttggcttcgatattcgccatgacttccggcggcaatgcgcgttccccggtaaatggactgccgggcgccaggcgcatcatgaagaatgagatggtgataaggataaatagtgtcgggatcgcttccaacaagcgacgaagtataaatttaagcattgccctaaccctgtgcgacagcctgataacggcttattattctcaacatgggccggcggccaagccgccggctcttaccgtatcaatgcttgatgatgtacaggtttttgtcgtacacgttatcaagcgggtctttgccggtgtagccaccgacgtaaggtttcaccaaacgggcgttcacatagtaatacagcggaacgatggcggaatctttatccagctgaacttccgctttctgatacagatcggcgcgctcgtctttggtcttcgcggtcaacacgttggccatcagcttgtcgaactcggcgctcttgtagtgcggggtgttactgctgctgtcggacagcatcatgttcaggaacgagctcggctcgttgtaatcggcgcaccagccggcgcgcgccacgtcataggtgccctgatgacgggtatccaggaaggttttccactcctggttcaccagcttcacgtccacgcccaggtttttcttccagatggaggcggcggcgatcgccagcttcttgtgcaggtctgacgtgttgtacagcagggagaaggtcagcggtttacccgggccgtagccggcgtccgccagcagtttcttcgccacttcgttgcgtttttcctgcgtccagccgaaccactccggcggggtcagcttggcaccgtcggtgtatggcggcgtaaagctgtaggccggcagatcgccctggtttttcaccttgttgacgataatgtcgcggtccatgcccagcttcagcgcttcacgcacgcgcgcatcggtgaacggcgccttctggttgttgatttcgtagtagtaggtgcacagataaggatcgacgtgcacctctttcgggatctctttcttcaacttctggaacagttcgatcggcatgttgttgtaggtcatgtcgatttcaccggtgcggtagcggttaacgtcggtcacttccgacgaaataggcaggaacgtcactttattgatgatggttttggcgttatcccaatattccgggttgcgttccagtacgatgcgttcgttgacaatccagtctttcagtttgtaggcgccgttgctgacgtagttggccggcagcgtccacttctcgccgaatttctccaccgcctctttataaaccggcttcatggcgtagtgcggggtcatttcaaccagataaggcaccggctcgctcagggtcacctggaaagtatggtcgtcgatggccttcacgcccagcgtcgacttgtcttttttaccggcgatgatgtcatcgacgttttccacatgggcgtactgcaggtagctggcgtaaggcgacgcggttttcggatccactacgcgctgccagctgtagacgaaatcttgcgccgtcaccggcttgccgttggaccatttggcgtctttgcgcaggtggaaggtccagactttgaaatccttgttatcccagctttccgcgacgcccggcacgatggaaccgtccgggctgttgttcgccaggccttccatcagatcgcgggtcacgttgttttccggcacgccctcgattttatgcggatccagcgactgcacttcggaaccgttgtttttgacgatttcttgcttatccgccagctgcacccccgcaggaacgtcggcggcgaaagcgccggtggttgctgtgatgccgagcgcggcgatgacgccggcggcaatgagggttttcttcgtgatgttggtcatacttatcgactccagtttttattatcacaggctcttcgtggaacctgcgttgcccgtaagcggactctgttttcccgccgccgcggaacgaatgcggcggccggccttccctatatcccccagcgcctcggcgtgaggaatacccctttactgcttgataatgtaaagatttttaacgtcggtatagtccagcggatctttgccggtgaacccgcctaccgtcggcttaatcaaccgcgcgctgacgcggtaatacaccgggatcaacgcggagtctttgtccagctgcgcttctgcctgctgatagagcgcggcgcgcgcggcctcatccggcgccttcagggtggcggccatgatggcgtcgaacgccgggctcttataaaacacggtattgatgctgctgttggacagcaccaggttcaggaaggcgctgggttcgttgtaatccccgcaccaggtggcgcgcgccacgtcgtattgcccctgatggcggctttccagcgaggtcttccactcctgattgcgcagcgtgacgtcggcgccgaggttcttcttccacatcgacgcggcggcgatcgcctgctgtttgttttgatcggaggtgttgtacagcagcgagaacttcagcggtttggcgtcgctgtaacccgcttccgccagcagtttcttggcttcggcgttgcgttgttcctggctccagccggcccaggcgggctgcgtgaagttggcgccttcggtgaaggttggcgtgaaactgtaggccgggatctgcccctggcccatgatcttgttggcgatgatgtcgcgatccagcgtcatcttcaccgccgtacgcacccgcggatcggtgaacggcgcccgctggttattgagttcgtaatagaaagtgcacagataagggttaacgtgcagttgctcgggcacttcgcgcttcattttgacatacaggtacggcggaatggcgctgttggtgatgtcgatctcgccgctgcggaagcggttgacgtcgctgacttcggaagcgatcggcaggaaggtcgcctgattgatcaccgtctgcttgttgttccagtagctcgggctgcgctccagcacaatgcgctcgttcaccacccactctttcagacggtaagcgccgttgccgacatagttggcgggcaacgtccatttgtcgccgaatttctccactaccgcgcgtttcaccggtttgagcgacgtgtggctcagcatgctgatgaaatacggcaccggttcgctcagcgtcacctgcagcgtctggtcgtccagcgccttgacgccgagggcctgtggaggcttcttaccggtcaggatatcgtcgatattgtcgactttggtgtactgcaggtagctggcatagggcgaggcgattttcggatcggccaggcgctgccagctgtagacgaagtcttgcgcggtcaccgggctgccgtcgctccacaccgcgccggggcgcaggtggaaggtccattgctgataattctggttttcccagctcgccgccgccgccggcaccacatgcccgttggcgtcggtgctcaccagcccttccagcaggttaagaatgatattgctttccggtacgccctcgaccttatgcggatccaatgaagccacttcgctgccgttgttgatcacaatattctgctgctgcgccaactgaacgccggccggcacttccgccgccaaactgctatttatggcgccgacgctcagcgcgccgctaatcaacaaggtcaaagaagtgcgcttcagggtttgctgcataatcgaggctccttttcaccgacaagcatcgcttatcgaagtttgtgaagtgtttataagaattctaaataaacggataccagcaaaaatcattcccgtttttatggcgcatttcagttaattgaccacgggaaagttgctcggaaattagcagaagccaaattccatagccaataaattttacgaaaatgttaagcaattctcttttatcgcacgaagcccgatccggcccccaagatcgaggacgcggagaaacaaaatcatcgctatgattttaaagaaaaaaaagacgaaatcatttcatttgaaaccatcaacgcaatctcattaccgcacaaagaaacattcagttaacaatccggacattcaaagaacaaacacctgcctatggtcggttaatcactaataacacctggatgaaagtgagacaagccccacagaatgatgtgattaatttaacaacagctttaccgttgagcgggggaaaaacgcgcggaaatgggggaagaaaagtgtctgaaataacgcttagcgttttttttgcacagcaacatgagatttatgcaacataagagtgcaaccgcataaattttattcatcctgtgcactataataatgcgaaccaataaataatttaaactttaaaattaattttagccgcgccaaggcgaaaggtgcgcggctaaaccaagggtattacaacaggccggggaatatcgccttaatgccggtaacgataaactcgatcccgagcgccatcagcaacagacccattatacgggtgatcacgttgatgccggtctgcccaagcaaacgcaccaacagcggcgcggcgcggaacaacaaccaacagcaaaaggcgaacaaggcgattgcgaccgtaaagccgagcaggctttgccagttgtgataacgggaactccacacgatggtggaactgatcgcccccggccccgccatcagcggcagcgctaacggcaccacgccgatgctctcgcggatcgcgctctccgatttttcctgtttgttctgtttgtcttctcccagcttgccgctgatcatcgacatggcgatggtcaccaccagaataccgccggcgatgcggaacgaatcgatggagatgccgaacatccgcaagatcccttcgcccaggaacagcgatgtccacagaataatggcgaccgacaggttggcggtcaggttggttttattgcgccctgcttccgcctggtagctggtcatgctgataaacaccggcaagatacccaccgggttgaccagcgcaaacagaccgacaaagaacttgataaagccggaaagatccaacagagattggcccacagatggctccgcgttaagtgctataaaaaggtgtgctgcctatgcgcgctaatgtaatggaattgccgcgggtaatccatccggccagagcagcatttttgactaccagcaagttaggcaacaaaacaaatgccctttgttaaagtgatgtatggccttttgattttttatgttgaaaaaagagtcatcgatcacagttattgataaccactctcaacaccgtcaagctgaaaggtgtcagcttgcacttttcatgatttagatcacaaatcaactacccaacagtgggtaagctcttagtcgtagtcagggagtagaacaaagtcggtggcaatccagccggttccgttctcttcactgcctgcccctccggttggcgcagggtaaagctctttaagcaaatcagcagcatgcgaagaaataacgcgggaaacccccggtattcgaatcaccgtttattcccgttatgactatactagtggctcgcacggcttatttactgaaagagtttaacattatcaggagagcattatggctgtaacgaatgtcgctgaactaaacgagcttgtcgcacgtgtcaaaaaagcccagcgcgaatatgccaacttcactcaagagcaagtggataaaatcttccgcgctgccgccctcgccgctgctgatgcccgtatcccgttggccaaaatggccgtggaagaatccggaatgggtatcgtcgaagacaaagtgatcaaaaaccacttcgcttccgagtacatctacaacgcctataaagatgaaaaaacctgtggcatcctgtctgaagatgacactttcggtaccatcaccatcgccgaacctatcggcctgatttgcggtatcgtccctaccaccaacccaacttctaccgcgatcttcaaagcgctgatcagcctgaaaacccgtaacggcatcatcttctcgccgcacccgcgtgcgaaaaatgccaccaataaagccgccgatatcgtgctgcaagccgctatcgccgccggcgcgccaaaagacatcatcggttggatcgaccaacctaccgtcgaactgtccaaccaactgatgcaccaccctgacatcaacctgatcctggccaccggtggcccgggcatggtgaaagccgcctacagctccggcaaaccggccatcggcgtcggcgccggtaatacgccggtcgtggtagacgaaaccgcagacatcaagcgcgtggtcgcctctatcctgatgtccaaaaccttcgacagcggcgttatctgcgcttccgaacagtcggtcatcgtcgttgacgctatctatgatgcggtacgcgaacgcttcgcttcccacggcggctatctgctgcagggtaaagaactgaaagcggtgcaggacatcatcctgaaaaacggcggtctgaatgcggccatcgtcgggcaatccgcaccgaaaatcgccgaaatggcaggcatcaaagtaccggccaacaccaaagtgctgatcggtgaagtgaagctggtcgacgagtccgaacctttcgcacatgaaaaactgtcgcctaccctggcgatgtaccgtgccaaagacttcgaagacgcggtcgccaaagccgaaaaactggtcgccatgggcggtatcggccacacctcctgcctgtacaccgaccaggataaccaaacggctcgcatcgcctacttcggcgataaaatgaaaacggctcgcatcctgatcaacaccccggcttctcagggcggtatcggcgacctgtacaacttcaaactcgcgccttcgctgacgctgggttgcggttcctggggtggcaactccatctctgaaaacgtcggacctaaacacctgatcaacaagaaaactgtagcgaagcgagcagaaaacatgttgtggcacaaacttccgaaatcgatctacttccgccgtggctcgctgcctatcgcgctggaagaagtggcgaccgacggggcgaaacgcgccttcatcgtgaccgaccgtttcctgttcaacaacggctatgctgaccagatcaccaaggttctgaagtctcacggcatcgaaaccgaagtgttcttcgaagtggaagccgatccgacgctgagcatcgtgcgtaaaggcgccgagcagatgaactccttcaaaccggacgtcatcatcgcgctgggcggcggttcgccgatggacgccgcgaaaatcatgtgggtgctgtacgaacatcctgaaacccacttcgaggatctggcgctgcgcttcatggacatccgcaagcgtatctacaaattcccgaaaatgggcgtgaaagcgaaaatgatcgccatcaccacaacctcaggtaccggttcagaagtcacgccgttcgcggtcgtgaccgacgacgccaccgggcagaaatacccgctggccgactatgcgctgaccccggacatggcgattgtcgacgccaacctggtgatgaacatgccgaaatccctgtgcgccttcggtggcctggatgcggtgacccacgcgctggaagcctacgtctcggtgctggcgaacgaatactccgacggccaggcgctgcaggcgctgaaactgttgaaagagtatctgccggccagctacaaagaaggcgcgaaaaacccggttgcccgtgaacgcgtgcacaacgccgccaccatcgccggtatcgctttcgccaacgccttcctcggggtttgtcactccatggcacacaaactgggttcggagttccacattccgcacggcctggccaacgcgatgctgatttccaacgtcattcgctacaacgcgaacgacaacccgaccaagcagacggccttcagccagtacgaccgccctcaggcgcgccgccgctacgctgaaatcgccgaccacctcggcctgagcgcaccgggcgaccgcaccgcgcagaagattgagaaactgctggcctggctggacgagctgaaaaccgagctgggcatcccaacctccatccgtgaggcgggtgtgcaggaggcggacttcctggcgaaagtcgacaagctgtcggaagacgcgttcgacgaccaatgcaccggcgccaacccacgctatccgctgattgccgaactgaagcaaatcatgctggataccttctacggccgcgaattcagcgaaacagtcgaagaggaagcgacagctccggctgtagccaaagccgcggtaaagaagtccaagaaataacggtttcgtgaaccgataaaaaaacccgccaaacggcgggttttttattgcgccggaggcgctgcatttcgactcacgccgccaaaacgcctcagcgggctttggcggcgttttctccccctactccagggagtgaatcgcctctttataatgcttgcggcagacggagacatagctctcgttaccgccaatcaccacctgctcaccggcgtgcatcgcctggccgttttcatccaaccgcaacaccatattggctttgcgcccacagtgacagatggttttcaattccaccagcttatcagcccaggccagcaaatattggctgccggtaaacagctcaccgagaaaatcggtacgcaggccgtagcacaatacgggaatgtccagttggtccaccacatcacacaattgctcaacctgcgccttggtcaggaactggctttcatccagcagtacacaatgcaccggctgctgttgatgctcttgctgaatcatggcgtacagcatcgagtcgttgttatagagctgggcctgcgaggataaaccgatgcgcgagctgaccttacctacgccaaagcggtgatcgatctccgcagtgaacaccagcgtgcgcataccacgttcttgatagttatatgaagactgtagcagcgcggtggacttgccggcattcatcgcagagtaataaaaataaagttgagccatggccccgcaactccgatggtataagaaatattcaaatgtcgattaggacggtaagtgtaccataagccgcccctaggctcagcccaaagcgaacgaatattgcgttcgccgtaataatgcgctttcaagcgaaacatatcgttctgtcggcccgttctttttacagctatttacaggataatgtatgcctgtcatcactattaattcttgctaatggttaaccgcgatcatttgcccattaatgcataatcaccctttcgccgcggcgggtgccgcaaccgcaacggcgcgccagtctattatacacggggccaatacagggcatttaatcacctccgctgtccccgacgtttcctgacgcaatctttacctatatacccctattgtttacaatgtctgccttgccatgacgtgattaagcccacagaacccattgtaatattgatataaattacggcgataacttatcgatgaaagccttgcgacacgcgccttttaaagcatgcctgctgaaattttgacttaagtgcgacaagggtaatagttaacagcccttcctatattagtcggacagatccgattaacggatttttaaaaggtaaatttgagtattcaagtcaatttggctattgcagaaaagaaaatagcactctattattatcgagacgccccccaccaatataatttgagactaggacaatgagcgaagcattaaagattttgaacaacatccgcactctgcgcgcccaggcaagagaatgcacactggaaacgctggaagaaatgctcgagaaactggaagttgttgtgaacgaacgtcgcgaagaagacagccaggctcaagcagaaatcgaagaacgcacccgtaaactgcagcaataccgcgaaatgctgattgctgacggtatcgatccgaatgaactgctgcaaaccatggctgccaacaaggctgccggtaaagcaaaacgcgcagcacgtcctgctaaataccaatataaagacgaaaacggcgaattgaaaacctggaccggccaaggccgtactccagcggtgattaagaaagctatcgaagagcaaggtaaatctctggacgatttcctgctgtaatagcgattcggcccgtatctgaaaggctccctgcggggggccttttcattttaaagcttatcgccgcgatcctgcctcatccctttccttttagtaaatatcctaattcgcattttgttccttgcatgaggttccagcgataaaaaagggccctaaggcccctttgtcgcatataccctcgttcaattattgaacctggtagaatgccttataccaatcaacaaagcgcttcacaccctcttcaacgctggtttccggcttaaaaccaatgtcacgataaagctctgcggtatccgcgctggtatccatcacgtcgccaggttgcattggcaacatattcttgcgggcagttagccccaaagcctgctccaacgccgtgatatattccatcagtttaacgggggtgttattgccgatattataaacatgatacggcgcggaactggtcgccggcgatccctgttcaacggtccatgacggatctgcctgcggaataaccgcctgcagccgcacaatcgcctcggtgatatcatcaatgtaagtaaagtcacggtgcatttcaccgtggttatatacatcgatactctcccccgccaatatggccttggtaaacttgaacagcgccatatccggacgcccccagggaccatatacggtaaagaagcgtagccccgtcgtcgggagaccgtataaatgagcgtaactgtgtgacatcagctcattggcttttttggttgccgcatacagtgacacagggtggtcgaccgaatcttcggtagcaaacggcaacttgcgattgaggccataaacagaactggaggaagcgtaaagtaaatgctcgaccttattatgacggcagccttccagaacgttcaaatgaccgatcaggttagcgtccgcataagccaacgggttgaccagcgagtaacgcacgccggcttgggcacccaaatgaatgactcgttggaactgatgctcggcgaacaatgtcgccatgccttcacgatcggccaaatccaacttgatgaagcggaatcccggcttatccgccagtctgtccagacgggccattttcaggcccacgtcataatagtcattcaggttatcgatgccgacaacctgatgcccggcggtcaacaaacgctctgcaacgtgataaccaataaaccctgcggcgcctgtaaccaggaatttcatgcccactccttaaataaccggtttaatcgaggcaccgcggccaatcgcatagtaggtaaagccgcgattcgccaaacgctcaggatcgtacaggttacgtccatcgaagatcaccggctgcttcaacgcgcccttgatcacatcaaagtccggtgcgcggaaattctgccattcggtgcagatcaccagagcatcggcgccgtgcaacgcagcctctttggtacccatcagcttcaagtcgtcgcgctggccatagatgcgctgaacttcgttcatcgcttccggatcgtaggcctgaacggtggcgccggcagcccacagctgctccatcagcacacggctggacgcttcacgcatgtcatcggtattcggcttgaacgccagcccccacagtgcaaaggttttgcccttcaaatcgctgccgaaatagtctttgataaagctgttcagcttgtctttttgttggtagttgacctgctctaccgcctgcaacagcttcggttggtaaccgatctgctccgccgtgcggatcagcgcctgaacatctttcgggaagcaagaaccaccgtagccacagccaggatagatgaagtgataaccgatgcgtgaatcggaaccgatgccctgacgcactttctcgatgtccgcgcccaacatttccgccaggttggacatttcgttcataaagctgattttggtcgccagcatgcagttggcggcatatttggtcagctccgcgctgcggatatccatcatgatcatacgatcgtgattgcggttaaacggctcgtacagctcgcgaataggctcgatcacctctttattatcggtgccgatcacgatgcgctcagggcgcatgcagtcagccactgcagcgccttccttcaggaattcagggttggacaccacgtcgaacggcacgttgctgccgcgttttgccagcgtttccgtcatcacctgacgcactttgtccgccgtaccgaccggcacggtagatttgtcgatcaccactttgcgatcggtcatgtgctcggcgatggtgcgcgccaccgcggtgacatatttcagatcggcggaaccgtcttcatccggcggcgtaccaacggcgataaactggatattcccgtgcgccacgcccgctttggcatcggtggtgaaatgcaggcgcccagcctcatagttttgctgtaccagcggcgtcaggcccggttcaaaaatcgggatattcccttttttcaggttctcgacttttcgttcgtcaacatcgatgcacataacatcatggccaacttcagccagcacggcggcctgtaccagccccacataaccaataccaaaaactgttactttcatgtgaaaatcctagtttttcaaattaagacgaaagatcaaattacttcttgtcagcggcaacaacctgttgcagccactgagaaaactctttgcccaggctggcatgacgcatgccgtactccacgaaggcctgcatgtaacccagtttgttaccgcagtcatggctcacgcctttcaggtgatacgcttccaccgtttcctgctgcatcagcatttcgatgctgtcagtcagctgaatttcatcgccggcgcctggaggcgttttcgccaacagcggccaaatatcggcggacaacacataacgaccgacaatcgccaggttggaaggggctttatccggcgacggtttctcaaccacgctgaccatcggcgcgctttcgcccggttgcaaatcaacgcccttacagtcggctacgccgtagtttccgacatccttatgcggcacgggttcaaccatgatctggctgacgccggtggcttcgaagcgctgcagcatttcgtgcaggttgtcttttttcggatcggcgctgtattcgtcgaggatcacgtccggaagcaccaccgcgaccggttcatcgcccaccatcgggtaggcacacataatcgcgtgccccaggcctttggcattaccctgacgaacctgcatcacggtaacgcctttcgggcagatcgactgcacttcgtccagcaattggcgcttgacgcgtttttccagcatcgcttcgagttcgaaactggtatcaaaatggttttcgatcgagttcttggaggagtgggtgaccagcacaatctcgttaatccccgccgcaatgcactcattgacgacgtattggatcagaggtttatcaaccagcggcagcatttctttcggaatggctttggtggccggcaacatccgcgtacccaagcctgcaaccgggatcacggcttttctgactttgcgatttacagcaggcattatttcctctcttaaagctaaagcgctcattttatgagcgtgggctcgatataaaaaaaccttcggagtataccagcttatgcgcgccgagcattaaccagaacacaaatagaaaacatttaggactattacccgttcggataatccggagaataaataaacggtttaattacagataagtaaatagcttgagatcgcgccgatcgctgcctgctattcagcgctgagcatcagtcgcaatcggccaccgctgccccatacctgacattgccaggcggtacaacgctggctgatctgattcatgtaggtagcccccagcgtccccagcggcacgccgttgctcagctggatttgattgtcaccggtattgacgttggcatgcagcccggcggaaaccagaatcaggtttttattttcggcgtgataatatcccaacaacagagggaattgaccgtccaatttcccctgccgcaataattgattaacctgctttaacaatgccgacatttgcggcaaacgatgctgttgattagccagatggtcctgcagcagcccattaaataatgcgcgcaacagcagcgccgccaatacgccattatcgccggcgcgcgtgacgtccagacaatagaatgccagatccttttctgacaaggcggcgatatccagcaccaggccgggattttcgccggtggttaactgccgatagttgatccggcaatgcgcaatggtctgctgtaccggcggctgcagttgcttaagcagtttgacggcttcggaaggatttttgctcaacgcatcccaatcctgaaacagttcaacctcttcaatcgcctgggaggtgaacatattggggtataagcacgccagcaccgcttcacgcaggcgattgagatcggtcagcggcttgagcagcacatcctgcacgcccaaccgcagcaccttggcgatgtccgccatcttgtcggtggccgagatcaccagcaccgggatctgcagcccctgcaaacgcaggtgttcaacgaattcgataccgcccatttccggcatcgcgagatcgcacagaatcagatccggcttgaagtcatcgacggcactcagcgcctgtaaaccgttggtcgcctcgccggtttcagcgcccagcgaggtcagataaccgaccagcacggaacgaaaaacctgttcgtcctcaacgatcaagatgcgcttgtgagtgagtggtaatgccatcagccgagcctcgtccctttccatagtgtaatagtggctcaaaaaggtcacttatgctcgtctgaaacagaccaactgcgcattgccaaccaagaaccgagaattatctattttttatcaacggcaacaaccgatccagttgtttttcaaccgccagcaaccccgcctcgatcgcttcatcggcgcggtggaaatccagcgttgagatttgcgggcaaaaaggctggatcaagacatccggcggatcgctcgccattcggttgcgcttcaggcgattctccagcatttgaatcgatgtgctcataatctccatcgccgtcggcgccgtcgccggtttgcgcttgcgcattctgccgacgcgttcccgcagacgcccgcgccaggtagccgcaggcgcatcgtccgggctttcttcctcgatacgtatcgagaacagatcctgctgcatcaggtgcgcgtcatgctgcagatcgaccgcaatgacgatatcggcgcccatggcgcggcaaagcgacaccggcaccggattgaccaccgcgccatccaccagccaatagccgtcggcccataccggcgccaacaggccgggcatgctgcaggaggcgcgtatcgcctgatgaatatcgccttcggtcagccacagctcacgcccggtactgagattggtcgtcacggcaccgaacttcaacgcacaatcggcgatatcattgatcttcagcagctgtccgacggcgttaaacacccgctcgccccgcaacaggccgccgcgctgccaggaaaaatccatcaggcgaatcacgtcccaatagctgaacgatcgcacccactgctccatcgccggcaggcgatggctggcgaacgcggcgcccaccaacgcgccgacagagcagccggcaacgatatcgacctcaatccccagcttctttaacgcattgatcacgccgatgtgcgcccagcctttagccgagcccgctcccagcgccagtccgatcttgatttgccgcatcgcgtcatcctctcggtaaacggtgttctctgctttcagggtagattgtcactgacgaatattgttaggtaacatatgcgctaaattcattttcagcctcgttttctcaggagtcattttgcccgaatcatgcccatgcggcagcggactggcgtataacgcgtgctgcgccccttttatcagcggcagtcagccggcaccgacgcccggccaactgatgcgttcacgcttcaccgcctacgtgaatcataacgtcgactatctgatcgccacctggcaccccgactgcggcgccgaagcatggcgcaatgccatcgtcgacagttttaagaataccgagtggctgggcctgacgatcgtggaagagaaagccggtcatgagccggatgaaggcttcgtcgaattcatcgcccgtttcaccgatggcgaaagcggcgagccgcagacgatgcatgagcgctcgcgcttccttcgtcgcgatcaacgttggtattatatcgacggcaccaaaccccagcccggccgaaatgcgatgtgtccctgtggctcagggaaaaaatacaagaagtgctgcgggcgctaatcggccagcgcttcacgtttacgcctgcgcagacaggccgttcagtatcagacaggatcctcaaacccatgccacaccaaaatgtacaacggaaagtgttacgcaccatctgcccggacgccaaagggctgatcgccaagatcaccaacatctgttacaagcacgaactcaatatcgtccagaacaatgagttcgtcgatcaccgcaccgggcgtttcttcatgcgcaccgaactggaaggcattttcaacgacaacacgctgctggccgatctggacagcgccctgccggaaggttcactgcgtgaactgcacagcaccgggcgccggcgcatcgtggtgctggtcaccaaagaggcgcactgcctgggcgatctgttgatgaaaagcgcctatggcggcctcgatgttgagatcgccgccgtaatcggcaaccacgacacgctgcaaacgctggtggagcgtttcgatattcctttccatctggtgagccacgaaggcttgacgcgcgaacagcacgaccgcgaaatgacggccaagatcgatcaatatcagccggattacgtggtgctggccaaatatatgcgcgtgctgaccccggccttcgtgcaacattatccgaatcaggtaatcaacattcaccattcgttcctgccggcgtttatcggcgcacgaccttatcaccaggcctacgagcgcggggtaaaaatcatcggcgccactgcccattacgttaacgacaatctcgacgaaggcccgatcatcatgcaggacgtgatccacgtcgatcacacctattccgccgaggatatgatgcgcgccggccgcgacgtggagaaaaacgtgctcagccgggccctgtatcaggtgttggcgcagcgcgtcttcgtctacggcaatcgcaccgttattctgtaatcgttcaataaatcggtgcatttcgttcagggatgcaccgccaagaataaaaaaacggcaaacgattcattttctgcatttcaatgctttacacatccgcttcatttgatatgatgcgccccgcttaccgagacagcgctctcgcaagcaaggccagttaaatagccatgtatatggtggggttcccgagcggccaaagggagcagactgtaaatctgccgtcactgacttcgaaggttcgaatccttcccccaccaccatcttttcgttgctgatacgcattgggttaaagcgaatcagaaagggaaggataacgcgctttagcgcggcccgaagggtgaggaacgaagtgacgaataatccttcccccaccaccatcttctctctgccaggagcgaagacgcagtaaagaaaccggccaggtttcttccgggtaaaaccggaacaacaatttgtaaatccatgaataccatggtggggttcccgagcggccaaagggagcagactgtaaatctgccgtcacagacttcgaaggttcgaatccttcccccaccaccatctcttgcagaaaatcccaaaactgagttaaaagcacatcgcctccataatgctccgcacaggggaaggatgagaagtttcgacaaggttcgagtctcacgcagtgagacaacgcgcttcagcgcggcccgcagggtgagtcgcgcagcgacgaatcatccttcccccaccaccaccttttgcagaaaatccccgaacctaattaaaagcacatcacttccataatgctccgcattggggaaggatgagaagcttcgaccaaggttcgagtctcacgcagtgagacaacgcgcttcagcgcggcccgcagggtgagtcgcgcagcgacgaatcatccttcccccaccaccaccttttgcagaaaattccaaaccctacttaaaacacgttgcatccaatgttctcgtatcaataaatcaagttatctccccttatcgccgctttcaccttgatgttttatctcctctctcccagccgtaacttgaactccggccgacaattcgctataccactggcttctttagtgcagtaaggaacaggtggatgcgaaacaatatttgcgttttttgtggcgccagcgaaggcgtcaatcccgcttatgccgagcaggctcgtcaactggggcaactgctggccgcacaggggcgccgtttaatctatggcggcggcaaaaaaggattgatggggatcgtggcagacgcggtgttggccgcaggcggtgaagcggtcggcattatccccgagcgcctggttgaagcggaaacggcgcatcgcggcctgactgaattggaagtggtgccagacatgcatacgcgcaaagcccgtatggcagcgctggcggacagttttatcgccctgcccggcggcatcggcacgctggaagagctgtttgaaatctggacctgggggcaaatcggctatcacaataagccggtcggcctgctgaacgtcaacggattctaccgcccgctgagccagttcctcgagcacgtcgccgatcagggttttatgcgtcacgactatctcggcaccctgcacatcagcgaatcggcacagacgctgctgcaacagtttgacgactatcaacctaaaaattacgaccgctgggcgaaataaacccgcggcgcagtcagcggtcctgccgctgtctgcgttacatttcccgccaaactctgctactatcacagcacatttttctcgtgaaaacggcaccgctcatgaagtttgtctcttttaatatcaatggactgcgcgcgcgtccgcatcagctggcggcaattatcgaacagcaccagcccgacgtgatcggtctgcaggaaaccaaagttcacgatgacatgttcccattggaagaagtcagccagcacggctatcacgtgttctatcacgggcaaaaaggccattacggcgtggcgctgctgaccaaagcggagcccctggccgtgcgccgcggtttcccaaccgatgaagaagacgcgcagcgtcgcatcatcatggccgatctggctacgccgcagggcacgctgacggtgatcaacggctacttcccgcaaggtgaaagccgcgaccacccgatcaaattcccggctaaaacacgcttttatcaggatctgcaaaactacctggagcagcagctgtcggcagaatccccggtgctgatcatgggcgacatgaatatcagcccgagtgattatgatatcggcatcggcgaagacaaccgcaaacgctggctgcgcaccggcaagtgctccttcctgccggaagagcgcgaatggatggatcgcctgctgaactggggcctggtggatacctatcgccacgccaacccggggcgcaacgacgagttctcatggttcgactaccgctccaaagggttcgacgacaaccgcggcctgcgtatcgatctgctgttggccagcaccccgctggcttcgcgctgcatcgccaccggcattgattaccaaacccgcggcatggagaaaccttctgaccatgcgccggtctgggcggaattcacgctgtaaccccatcccccggcgctcgccggggttttattctgtgaagccgatgaaaattatcgacgtagtagccgccattctggaacaaaatgggcgtattttgctggcccagcgcggcgcaggcagcgatcaggccggcctgtgggagtttcccggcggcaaggttgaaaccggcgaaagccagccggaggcgctgacgcgcgagctggatgaagaattggggattaacgcccgtatcggcaactatgtgggcagcaatcagtggcggcaaggcgaacgcatcatccgactgcatgcctggcgagtcgcggagttctccggtgaactgcaacagcgctgccattcggcgctggtctgggtcacgccgcaacaggcgcaggaataccccctggcgcccgctgacgttccactgttggcggattatctcgccgcgcaaggcgaggcgcgctgagcgcggtgacaggttacatcgtcacttcttcaatcgtacccaaatcaaggggttggtgccgatagtattaggctcacgcacgcactgcagcacttccccttcgactttgagcaccgccccctcggaatagttctgattctggtagacgcaacaacggctgcagggctgcgccgacggcggattgtcgccgcttttggccgcgccccagatctccggcgaaaccggtagcaccacgtccacatcgccgcgattggcggcggccaggccggaaaacatcagggccgcggcagccaatacaccagtgagtccacgcttcattcactcttctcctgcgccttgccggcgcttttcctgcgttttttgcctccgctggagggcggcggcggcaatccacgaaacgccatgctcgcccggctctgcttggcctgataaatcagctcttgcagcgtgccgaccaacggctgcataaagtcctgatagcggcaggatttctcgctgatttgcgtcagcgtggcttcccagttggccgtcatatcagggcgcgcagcaagatccggcagcgagtgaatcaatgtgcgcccggtttcgctggagtgaatatagcgtcccttcttgtacagaaacgcccgcttgaacagcaattcgatgatccccgctcgcgtcgcttccgtacctaaaccatcggtcgcccgcaggattttctttagcgctttatcttgtacgaaccgcgcgatgccggtcatggccgacaacaggctggcgtcagtaaacggccgcggcggctgcgtctggcgctccaccacttcaccgcactcgcacaacagctcatcatctttagccaccaccggcagcggcgcaccttcgttctcctcgtcgcgctccttgctgcccagcagcgtacgccagccggcttccgccaggaatcgcgccttggcgataaatttgccgccggcgatatccagctcgatcacgcatttgcggaataccgcatccggacagaactgcatcagatactggcgcgccaccagcccatacacgttccgctcatcctgcgtcagattaatcttgccggcgcgggcggtgggaatgatggcgtggtgcgcgtcgacctttttatcgtcccagcaacggttgcggcgatcgctgtcgatcaccggctgcgggtacagctcgggctggtgcacgctgatggcgttcagcaccgcgtggcggccggcgaaatgctcttccggcaggtagcgacagtcggaacgcggataggtaatcaacttgtgggtttcgtacagccgctggcaaacgtccagcacctgttgcgcgctgaggttataacgccgggccgcttcgatttgcagcgtggagagcgaaaacggcagcggcgcggtatctgattcccgtttatcgttataggacgtgaccagcgccggctggccctcgatgcgcttgaccacgtgctccgccaacggccggtgcagcaaacgcccctcttcgtcctgataaggctcgcacgactcgctgggctgccacagcgccacgaaacgctcttctttcggcgtaacgatgtgcgccttgacctcaaagaagtctttcggcacgaagttttcgatctcttcatcgcgccgcaccaccaaccccagcaccggcgtctgcaccctgcccaccgacaacacgccgtcataaccggcgttgcggcccagcagcgtataagcgcgggtcatattgatgccgtacagccagtcggcgcgtgagcgcgcaagggcggacacgcacaatgggatgaagtcacggttgtcgcgcaggcgttcaaccgcgcgctccaccgcctgcgggttgaggtcgttgatcagacagcggcgcacgttctggcgcttttccgccgtcaaatccaggtagtccagcacctcatccaccagcagctgcccttcgcgatccgggtcgccggcgtgaaccacttcatcggcttcgagcagcaactttttaatggcgttgagctgtttgctgaccgaaggccgcggctgcaaccgccatttttcgggaattatcggcaggtctgccaacgaccagcgcgcatagcggctgtcataggcgtcaggctgagcctgctccagcaggtggccgacgcaccaggtcaccacatcattgttgccgcaggcgatatacccgtcgccgcggcgatgcggcttgggcaatacgtcggcaatggcgcgcgccaaactcggtttctcggctatgaacagtcgcattattcaccgtttttctggctgaacgtcatcaaaaattctcttacttctgcatagttcccacggaagacaatccgctgggctttcttttccaactgatagcaatacatcggatcgtagtactgctgcaacaggggcgccaaccactcgcggtgcgcgtcaccctggccgctgagacgctgtgcccgcaacgccgcttccagccgctgcgtcagctgctggaagcgctccaggcccaaccggcggcgaatggcgaacaggccgtgatgcagatagtcgtcgtactgccgccagccttcttccacgccataggcctgttcgaactgttcgcgcatcccgtcgatatattcggcctgcaggcgtgccaggcgaatatcaaacggatcgtcgatcaccgccaccggcgcctgctgcatgccgttgaacaacggcaacggcagattgttgctgccgatgatccgcccttcgtcttccagcacccaacggcggctgccaccatgctgttttttcagcaataacacagccagacgattctcaaaatcgatctgtgagctttgccccgccagcgttcggccaaaagatgaaccgcgatggcgcgccgcgccttccagatcgacgccgtcggccagttcgttgaccagcagcgtcttgccgctgccggtattgccgcccaccagagccatcggcaatgccgcgctttgcgccaacacgccgagcagataattgcgcagcgccttataaccgccagtgatacgcgggtactcgacgccggcctcatgcagccattgctgcaccagctgtgagcgcagcccaccacggaagcagtaaatataaccttcgggtcgctgcgcacaggccgccagccaggcggcggtgcgctgttcgcgcagtttgccgttcaccaggctgtggccgagcgcaatcgccgcttgctgaccatgctgcttatagcaagtgcccaccgcctgccgctcgctgtcgaccatcagcggcaggttcaccgcctgagcgaaggcgccctgctgaaactcgatcggcgcacgcacgtcaatcagcggcacgtcgtgcagaaaaatgcgttgataatcggcgctgtccggcctgccttgcatcttggacactacacaacctcgatcagcggtttacctgcctgtgcggcatgcagctcaccgataggattgagcgtgatgccgtgctgctcggcaatcgccagcacctgcgcctgcgcctccggcaataccgccaacagcaaaccgccggaggtttgcggatcgcacagcagctgacgctgcaaatcgctcatctcgcccaccagatggccgtagctgtcgaagttgcgcccggtgccgcccggcacgcagccctcggcgatgtacgcctcgacatccggcagtttcggcacccgatcgaaccagaccgtcgcctgcagaccggagccctgacaaacctcgctcaggtggcccaacaggccaaagccagtgatgtcggtcatcgccgtgacgcccgccacttcggcaaagtcggcgcccggcttgttaagacgacacatcacgtccgtcgccagcccctgatgctcggggcgcagcttgctttgcttctcggcggtcgtcagcacgccgatgcccagcggcttggtcagatagagtttagccccggcccgcgcggcgctgttcttcttcacccgctcggtattaaccacgccggtgaccgccaggccgaagataggttcaggcgcatcgatggagtggccgccggccagcgcgatccccgcctgctggcaggcgaaacgcccaccgtcgatcacctgctgcgccacctccggcggcagtttggcgatcggccagccaagaatggcgatcgccatgatcggtttgccgcccatggcgtacacgtcgctgatggcgttagcggcggcgatacggccgaaatcgaacggatcgtcgacgatcggcatgaagaagtcggtagtgctgatgatgccgacgccgttgccgatgtcatacaccgccgcgtcgtcgcgggtttcattgccgaccaacagacgcggatcgacaaatttttcccgctcgctgtgcaggatggtttcgagaactttcggtgagattttgcagccgcagccagcgccatggctgtactgggttaaacggatcgctggcgatgtcatagtccactcccttcggtaacggcactcaagataacatagggtagcgcttgccgaggggattgataagagcgggccgccgataagcgaacggcctgctcagaaaccatgcaattttgcggggtttggcgcattttcgccgcgccccgttggataatacttagaaatagctgacgaaaggcgtgctgtccggcggcgtcactttagtggcggccttcagctgcggcgtgcccagatagaggaaaccgacgatctcgtcctgctcgcggcaaccgaaggcttcacgcaccagcgcatgctcggtccaggcgccggtgcgccagatgccgttaaagccctgcgccagcgccgccatctgcatcgcctgcacggcgcaaccggcggaaaccacctgctcccagcgcggcaccttggtctcttcagtgcaatgcgcgatgacggtgatgatcagcggtgcgcggaacggcgccttggtggctttttcgatcgccgcttcatccaactgatcctgcttcgccgccgcctgcagcagctgactgaagcgctccaggccctgattctcgatcatcacgaaacgccacggctgcagcgcaccgtgatcgggcgcacgcaggcccgcgttgatgatgttttggcgcacttcccccgccggcgccggttccgccaggcgcgaagccgagcgacgattcaataaaagatccagagcatccatcgtaaactcctgataacaattttcattccggccacgttaacatagctaaacggcgagttacagcctcggcgatagcgtctgtgtgccacgatttaaagctgacatttacccggccgctcattaggatagcggaacattctcgactcttgttggagagcacatgcgcacattgtggcaaattattgccggcattttccggtggacatggcgtctgctgaattttatcagggaactgatccttaacctgttcctggtcctgctgatcctggttggggtcggcatctatctgtccttccaaagttcctccacctcgacggccccggcgcgcggcgcgctgttggtcgatttaagcggcgtggtggtcgatcagccttcggtaaacaaccgggtgcggcaatgggggcgtgaactgttgggcgcctccagcagccgcctgcaggagaactcgctgttcgacgtggtggacagcatccgcaaggccaaagacgacaaaaacattaccggcatggtgttgcagctgaatgacttcgccggcgccgatcagccgtcgctgcgctatatcggcaaagcgctgcgcgagttccgcgacagcggcaaaccgatcttcgccatcggcgacagctacaaccaaacgcaatactacctggccagctacgccaacaaggtcttcctgtcgccgcagggcgcggtcgatctgcacggtttcgccaccaacaacctgtattacaagtcgttgctggacatgctcaaggtcaccaccaatatcttccgcgtcggcacctataaatcggcggtcgaaccgctgatccgcgacgatatgtccccggcggcgcgcgaagcggacagccgttggatcggcggcctgtggcagaactacctggagaccgtggccgccaaccgccaactgacgccgcagcagctgttcccgggcgcagccggcgtgctgagcggcctgcaggcggccggtggcgacaccgcccgctatgcgctggacaataagctggtggacgagctggcgtcgcgcaccgcgatcgaaaatcagctggttaagagcttcggctgggacaaacaggcgaacgatttcaacgccatcagcatctacgactatcagccgaagccggacgccaaccagggcggcaagatcgccgtggtgttcgccaacggcgccatcatggacggccagcagacgccgggcaacgtcgggggggacaccaccgccgccgagctgcgccaggcgcgtctggatccggccgtcaaggccgtggtgttccgcgtcaacagcccaggcggcagcgtcagcgcgtccgaagtgatccgctccgagctggccgccgtgcgcgccgccggcaaaccggtggtggtgtcgatgggcggcatggccgcgtcgggcggctactgggtctcgacgccggccgactatatcatcgccagcccgagcaccctgaccggttctatcggcattttcggcatcatcaatacctacgagaaaaccctggatacgctgggtgtgcacaccgacggcgtggcgacctcgccgctggccgatatcgcggtcaccaaggcgctgccgcaggagttctcgcagatgatgcagctgaatatcgaaaacgggtataagaacttcctcgatctggtcgccaaatcacgcaagatgaccccgcagcaggttgaccaaatcgcacagggtcacgtctggctcggcagcgacgccaaggccaacggcctggtcgatcagttgggcgatttcgacgacgcggtgaagaaagccgccgagctggcaaagctgcagcagtggcagctcgactggttcgtcgataccccaagcctgagcgatatggtgctcagccagtttggcgtttccattcacgccatgctgccggccgcgattcaggccatgctgcccgccccgctggcttcggtcgccaacgcggtgaaagaacaacctggcttgttcaataacctgaacgatccgcaaaaccgttatgcgatctgtctcacctgcggagaagtccgctaacaaataattctgcagcccggccaccgccgggctttttttctgccgccatgtccctataattcagcccatcttatctttgttaaaatcataaccatgcaaaagaaatccatttacgtcgcctacaccggcggcaccatcggcatgcagcgttccgagcacggctatattccggtttccggccacctgcagcgtcagctggcgctgatgccggaattccatcggccggagatgccggatttcaccattcatgaatacgcgccgctcatcgattcctcggatatgacgccggaagactggcagcacatcgccgacgacatcaaacagaactacgatcgctacgacggcttcgtgatcctgcacggcaccgataccatggcgttcaccgcctcggcgctctccttcatgctggagaacctggccaaaccggtgatcgtcaccggctcgcagattccgctggcggagctgcgctccgatggccaaaccaatctgctgaatgcactgtacctggcggccaaccatccggtgaacgaagtcagcctgttcttcaacaacaagctgttccgcggcaaccgcaccaccaaagcgcacgccgacggcttcgacgccttcgcttcccccaatctgccgccgctgctggaagccggcatccatattcgccgccagcaaggcatcgacagcccggcttgcaacggcgcgttgcaggtgcatgacatcacgccgcagccgatcggcgtggtcaccatctatccgggcatttccggcgcggtggtgcgtaatttcctgttgcagccggtcaaggcgctgatcctgcgctcctacggcgtcggtaacgcgccgcaaaaggccgagctgatcgacgagttgcgtgcggcctctgaacgcggcatcgtggtggtcaacctgacgcagtgcatctccgggcgcgtcaatatggaaggctacgccaccggcaacgcgctggcgcatgccggggtgatcagcggtttcgacatgacggtggaagccgccctgaccaagctgcactatctgttgagccagccgctgacgccggaacaaatccgcgccctgatgcagcaagatctgcgcggcgagctaagcatcaacggttaacctactgaactctggagcggcgatgaaaacggccctgttgttgatcgatctgcaaaacgatttctgccccggcggcgcgctggcggtcacggagggcgacgccgtcattccggtcgccaatcaggcgatcgccgcctgcctggcgcggggcgagccggtggtggccagccaggactggcatcccgccaatcaccgcagctttgcggtgaactcccatgcgcaggtcggcaccctcggcgagctggaaggtctgccgcaggtgtggtggccggtgcactgcgtgcaagggagccacggcgccgattttcattctcaattgcagcggcaacacatcgatgccgtttttcgcaaagggcaggatacgagcatcgacagctacagcgcgttcttcgataacggccaccgggcgcagaccgaactgcacgattggctgcaatcgcagggcgtccggcggctggcgatcatgggcctggcgaccgactactgcgtgaagttcagcgtgctggatgcactggctgccggctatccgacgcaggtgatcgtcgacggctgccgcggcgtgaatctgcagccgggcgacagtgagcaagcgctgcaggacatggcgcgcgccggcgcacagctagttaccctgtcacagtttctcgccaactaaatcctctcgggcgccaccggcgccctctctacgcagcggcgaaattatcgacgccgctcacaataccacctttcttcttccccaacggcttgtgaccggcaggcgcttttgctgttatggctgcgacgcttttggcgtcaatcggttatacgcatccggggcccactgagcccggctttattgtgcccgcccctggcggtacggtcggccttgccgaccacaaggagacagacatgaaaataacccgaaaactgctgcctttgctggcggcggtgcaattggctatggccggcgcaagcacggcccaggcggcctatctctccgtcggctacttcaacggcggcggcgacgttaccgccggccccggtggtgacatcgacaagctggacgtgacgcaaatcacccatctcaactattcgtttggcctgatctacaacgacgagaaagacgaaaccaatgcggcgctgaaagaccccgctcgccgccaccagatctacctgtcgccgaaagtcacggccgatttgcaacggctgccggtgctgcgcaaacagaaccccgagctgaaagtgctgttgtcgatcggcggctggggcgcacgcggtttctccggcgctgccgccaccgcgggaaaccgggcgattttcattcgctccgcggtgcaggtgatcgagcagtacgggctggatgggatcgatctggactgggaatacccggtaaacggcgcctggggtttggtggaaagccaaccggcagaccgcgacaacttcaccctgctgctgagagagcttcatcaggcgctgggtaaaggcaagctgttaaccatcgccgtcggggccaacgtcaaaagcccgcaggaatgggtcgatgtgaaaagcattgccccttacctcaactacatcaatctgatgacctacgacatggcttacggcacgcagtacttcaatgccaacctgtacgattcaaagcgctggccaaccgtagccgccgccgaccgctacagcgccgattccgtggtaaaacattatctggccgccggattaaaaccggcgcagatgaacctgggtatcggtttctacggccgggtgccgaaacgagcgaccgagccgggcatcgactgggacaagccggacgccgccaaacatccggtgacgcagccttatttcagtgcgcgagaaaccgctctgttccgcacgctggggttggatctcagcaaagacacttactttaaataccacgatatcgtcagcaaattgctcaacgatccgcagcagcgttttcgcgaacactgggatgacgacgccaaagtgccatacctgacgctgcaatccgccgaaggcaaaccgctgttcgccatctcctacgagaacccgcgttcggtggctatcaaagccgagtacatcaaaagccagggattggggggagcgatgttctgggagtacggcgcggacgacaataaccggctggcgcaacagctggcggagtcgctgggaataaaaggcgagaaacggtaaatcgacgggggcgatggcgacatcgccccgctttagggacagcttactgcggtttaagtttgaccagcggctcggcaacaaactgctgcttcagttcttgcttgctcttcatcacgatctgcccgtcggtgccgatgctcatgtgctgcggatcgacgttgttcatcgactgccacagcatcaccgcctgcaggctgttttccttctgctcaggcgtcagcgccacgccgtccggccacttgcccagctcaaccgcctgcaccaggcgctggtatatctcgggcgtcatcgccgcaatcagatctttcacgtccatcagagcccttctcgcttacagatgaataattagctgaatcgattttgttgattaaattaccacttaaccggccgtttggtcgccattttcgccatcggtgaaactcagcgaggcggagttgacgcagtagcggtcgccagtcggctgcgggccatcagggaaaacgtgccccagatgcgcgtcgcagtggccgcagcggatttcaacacgatgcatattatgtgaattatcatcaagataacggattgcatcggcggaaaccggctcataaaagctcggccagccgcagccggaatcgtatttggtttcggaatagaacagcggctggttacagcacaggcaatggtacacgccctcgcgcttgttgtgcagcaatttgccgctgaacggcgcttcggtgccacgctgttgcgtcacataacgttggatttcattcagttccgtgaccggatgaccgggggttgtctctttagccatttgtgcttatctctgaatgtggataatgtcaacgaaaacaatgattaataataacaaaaaattaacaccgctgcaggggtttttggcctaaactgtagcccataaaggccacgtcacgatgatatgtgataaagatcacacatcttgcgtatgctgactttatacttggcggcttgtccccatataacggatgaggccgagcgcaattggactgtgcaataagcgtgcaaaaccacccttccggtttgacttgccgcaagtattgacacgattccgcttgacgctgggtaaggtttttgtaattttacaaccaaccttttattcactaacaaatagctggtggaatatatgactatcaaagtaggtatcaacggttttggccgtatcggtcgcattgttttccgtgctgctcaagagcgttctgacatcgagatcgttgcaatcaacgacctgttggacgcagagtacatggcttacatgctgaagtatgactctactcacggccgtttcaacggtacggtagaagttaaagacggccacctggttgttaacggcaaaaccatccgtgttaccgcagagaaagacccggctaacctgaagtggaacgaagtgggtgttgatgtggttgctgaagcgaccggtatcttcctgaccgacgaaaccgcgcgtaaacacatcaccgccggcgctaaaaaagtggttctgactggcccatccaaagatgcgaccccaatgttcgttcgcggcgccaactttgacaaatatgccggccaggacatcgtgtccaacgcctcttgcaccaccaactgcctggcgccactggctaaagtcatcaacgacaacttcggtatcgttgaaggcctgatgaccaccgttcacgccaccaccgctactcaaaaaaccgttgatggcccgtctcacaaagactggcgcggcggccgcggcgcatcccagaacatcatcccttcttctaccggcgcagcgaaagcggttggcgtggttctgccagagctgaaaggcaaactgaccggcatggcgttccgcgtaccgacccctaacgtgtccgttgttgacctgaccgtgcgtctggaaaaagcggctacctacgaagaaatcaagaaagccatcaaagacgccgctgaaggctctatgaaaggcgttctgggctatgttgaagacgacgtggtttccaccgacttcaacggcgaagtactgacttccgtgttcgatgccaaagccggtatcgcactgaacgacaacttcgtgaaactggtttcctggtacgacaacgaaaccggctactctaacaaggttctggatctgatcgctcacatctccaagtaatggcatgatgttaagctgataatgagggcgacatttttgtcgcccttttttatttgtatctccggcaaacaataggtcatgaaatgaacgagaaaattttcaccctgcccgtttccgaacaaatttctccttatatcagccagcggcaactcgatgagctgggcgtggttgtggtgtcgcacccgaaagtgcgcgcggccgtcgcgctgcaaggcgcgcatttgctggcctggcagcccagcggtgagcagccggtgatttggctcagcaacaacacgcctttcgccacaggcaaggccatccgcggtggcgtgccgatctgctggccgtggttcggcccggtggcgcaaccctcccacggctttgcccgcaaccagccctggagcctgacggcgcacgatgaagatgagaacggcgtcatcctgacctttacgctgaaagacaatgagcagacccgcaaactgtggccgcacgccttcacgctgattgctcgcttcaagctgggtgaagagtgcgagatcgagctggaatcgcacggcgattatcaagccacggcggcgctgcacagttacttccaggtcggcgaaatcgatcgggtcagcgtggcgggcctgggcgagccttatatcgacaaggtggcgggcggcgcagaggcgcatcagacgggtgaagtgacattcatcggccaaaccgaccgcgtctatacccgcccggaagctttcagccagatccgcgatccggcactcgctcgcaccatcgaggttcaccaccatcatatgagcgacgtcatcgcctggaaccccggcgtggaactctcctgcagcatgggggatatgccgaacgacggttacaagaccatggtctgcatcgagaccgggcgcgtcagcaaaccgctggtcgctgccggcgagcaacccgcccgtttgggtgtcaccttccgcagtcgtaagaaggcctgaggaaccgtgcgcggaagcgcactacagatgtgcaaaaggggcgccagcgcccctttttgatgcacgacatgcacgatagttgtgcaatgcgtgattagaaggtgtagctcacacctgtcatcaacaaaccggtgtaagatttatccaccatcgggctgtctttcacttcatccgacaacttcacatagcggccgacgaagaaggcgttccagcttttgttgatctgataattggcgctcagctcgagatacggagcccagctatcgccaggggtgtagctgtccaggccgctgcgacgtgattcattggcgctgacgccgtagtaatatttgttctggttcttgctgttccacatcacgcccacgcccgggaccagcgtcagcgcgtccagatcaaacttgtacagataagcaacatcgcccaccagcccgttgctgttgttcagcgtgtcgccggtgaacgtggtacgaagggtgccccattccgcgttgtgcgaataggccaggccggccatcagcgtgccgcgacgcttgtcgaggcgcttcatgcgatcgtcgtcgctgtcgcccggacggtagccccatggcgtgtagtaacccatgatgctcagctggttttcttgatctttccacaggtagtaaccggcggtcagagtacggaagtagaagtcgtcaccttcatagtcgatgacgggcaccggataaacgcggtcctgataaccgcgatacgcgtccggactaaccagcgcggcagcaccgagtgaccaggtccccgcctgagcactttgcgcacaaaccattgcggaagcgataattgctagcgttttgagttttgaaatcttcactggttctttttccataaattacagggttaatagccgcgatagtttatgtgaaaatttagttgcgtgcctaatctttacaaaggaaaacgaccaagatcgaataacttatagcggaattatgaattaatcatggcggaacgatgacgttttatcccgcaggccgcgccagacaaggcatttggttatcccggcaataactgagtcattgatatgacttaaaaaaagctttttctgcggcaggaaattttccggcaagcaaactaagcttaaatcagaaggtgaatttatcctgggcccagtggcatacagcgcaactcgcgataataagcgcaccaagttggcatacgggttgctgtactcaggcgtattctcatctttcgggagccagaacactatcacacgctctctttaacctgtgctaataacgaaaggacgggcatcatgaacatatttgaccactatcgccagcgctacgaagctgccaaggacgaagagttcacactgcaggaatttcttaccatttgccggcaagatcgcagtgcctatgccaacgcggccgaacgtctgctgatggctatcggtgaacctgtgatggtcgacactgcgctagaatcacgcctgtcgcgcctgttctccaaccgcgtgatcgcacgctatccggccttcgaagaattctacggtatggaagaggccatcgaacagatcgtctcttacctgaagcacgccgcgcagggcctggaagagaagaaacagatcctttacctgctgggcccggtgggcggcggtaaatcctcgctggcagaacgccttaaagcgttgatgcagcgcgtgcccatctacaccctcagcgccaacggtgaacgcagcccggtcaacgatcatccgctgtgcctgttcaaccctcaggaagatgcctcaatcctggaaaaagagttcaacatcccaagtcgctatctcggcaccatcatgtcgccgtgggcggcgaagcgcctgcacgagttcggcggcgatatcaccaagtttaaagtcgtgaaggtgcgcccttccatcctggagcagatcgccatcgccaaaaccgaaccgggcgatgagaacaaccaggacatctcggcgctggtcggtaaagtggacatccgtaagctggagaaccacgcgcagaacgatccggacgcctacggctattccggcgcactgtgccgcgccaaccaggggattatggaattcgtcgagatgttcaaagcgccgatcaaagtgctgcatccgctgctgacggcgactcaggaaggtaactacaacggcaccgagggcatctccgccctgccgttcaacggcattattctggcgcactccaacgaatccgagtgggtgaccttccgtaacaacaagaacaacgaagcgttcctcgaccgcgtgtacatcgtcaaggtgccttactgcctgcgcgtgtcggaagagatcaagatttacgacaagctgctggatcacagcgagctgactcacgcgccctgcgcgccgggcaccctcgaaacgctggcgcgctttagcgtgctgtcgcggctgaaagagccggaaaactcgagcatttactcgaaaatgcgcgtgtatgacggcgaaagcctcaaggataccgatccgaaagccaagtcctatcaggagtaccgcgactacgccggggttgacgaaggcatgaacggcctctccacccgtttcgcctttaaaatcctctcgcgggtattcaacttcgatcacgccgaggtggcagccaacccggtgcacctgttctatgtgctggagcagcagatcgaacgcgaacagttcccgcaggatttggccgagaaatacctcgaacatctgaaaggctatctgatcccgaaatacgccgagtttatcggcaaagagatccagaccgcctatctggaatcctactcggaatacggacagaacatttttgaccgttacgtgacctacgcggacttctggatccaggatcaggagtatcgcgaccccgacaccggtcagctgttcgaccgcgagtctttgaacgccgaactggagaaaattgaaaaaccggccggcatcagcaacccgaaagatttccgcaacgaaatcgtgaacttcgtgctgcgcgcccgcgccaacaacaacggccgcaatccgaactggaccagctacgagaagctgcgcaccgtgatcgagaagaaaatgttctccaataccgaagagctgttgccggtgatttcgtttaacgccaaaacctcgacggacgagcagaaaaaacacgacgacttcgtcgaccgcatgatggagaaaggctatacccgcaagcaggtgcgcctgttgtgtgaatggtatctgcgggtcagaaaatcctcataacgcctcaggtaagcggcattatcagggccatgtccacagtcatggacgttgcagcgcagcccaaggaggggcttacacattgcgctgtcgcgaccgggacatgaagagttggcaacgtcgtttgggggaagtatggcctatttcattgaccgacggctgaacggcaaaaacaagagcatggtgaaccgccagcgcttcttgcgccgttacaagtcgcaaatcaaacagtcgattgccgaagccatcaacaagcgttcggtcaccgacgtagacagcggggagtcggtctccatccccactgacgatatcaacgaaccgatgtttcatcaggggcgcggcggcacacgccatcgcgttcacccaggcaatgaccacttcgtacagaacgatcgcgttgagcggcctcagggcggcgcaggcggtggcggcggccagggcaacgccagccaggacggtgaaggccaggatgaattcgtcttccagatctccaaagacgagtacctcgatcttttgttcgaggatctcgccctgcccaatctgaaaaagaatcagtacaagcagttaaccgagttcaaaacccatcgtgccggctataccgccaatggcgtgccggccaacatcagcgtcgtgcgttcgctgcagaactcgctggcgcgacgaaccgccatgaccgccggtaaaagacgcgcgttgcacgagctggaagatgcgctgacccagttggaaaataccgagccggtgcaattgctggaagaggagcggctgcgcaaggaaattgccgaactgcgcaagaaaatcgaaagcgtgccgtttatcgataccttcgacctgcgctacaaaaactatgagcgccggccggagccctccagccaggcggtgatgttctgcctgatggacgtgtccggctcgatggaccaggcgaccaaagacatggccaagcgtttttacattctgctctatttgttcctgagccgaacctataaaaacgtcgaggtggtctacattcgccatcacacccaggcgaaagaggtggacgaacaggagttcttctattcgcaggaaaccggcggcaccatcgtttccagcgcgctgaagttaatgaatgacgtagtcgaagagcgttatgacccggcacaatggaatatctatgccgcgcaagcgtcggacggcgacaactgggccgacgattcaccgctgtgtcatgagctgttggcgaaaaagatcctgccgatggtgcgttattacagctacatagaaatcactcgccgcgctcaccaaacgctgtggcgcgaatacgaggatctgcaggcgaaattcgacaacttcgccatgcagcatatccgcgaaccggacgatatctatccggtattccgcgaactgttccgtaagcagaccgtgtgaataacgccgcgtgaatgtcaccacagccggaaagcaccgttttccggctgtttctttttcgcattatatatttgcaaaacccatgtttattttttaaacaatgacaacaacaataataagtcagattccccagaacggtcctctctattatttgttcttctgaggttattcctaaacatccgccgctccccccgcacggcttgataggaatattcccattcagttatcgttaccccatcgcttaagtctcttcctaagcgaaatttgcctcattttatttttctatggcttctcagcccgctgcggcgggcatttacctgtcagcaggttagacatcatgatcgactacaccctctatggcctcaacaagcacgatgttgatgaataccataagcaaatatgttgcctgctcggcaaaaacgtgctgctggtgttgaccgccaacaagccgataaccaaacagaacctgctcgccagccttatccaggagatagaaaagcagcccgatgattattttcagcggctgcatcgcgcggcaatagaaatgatcggcgttaacggacgctaaggcgatatgcgtaaggcagacctctacgccattattgccgtcgccgtcgtgttgatgatgctgttataacgatatcagcgaagggataatctgccgcagaatgtcgagccttcctgcccctgctttatttcaaaccggccgcttcgtcaatcaaacccgccacctcatcggcatgcgaaaccagcgaggcatggctggcattcagcaccatcactttcttggcctgcagccgctgcgccatgcgccgctgattctccggcgcgatcatgcgatcgtcgctggaaagttgataccatgacggcttatgtttccaggcgggctcgccgatggtgttgccaaaggtctcggccagcggggccttctgcgccaccgccatcaccaatgcctcgtcggcggtcagatcctggcaaaagctttcgtgaaacttgtcggttttaatccacagataaccgtcgctgtccgaggccagattctcgactgccgcaggaggatgcgcttgcgtaataccgccggcactttcaccggcatccggcgcaaacgcggcgatgtagaccaggccaaccacgttaggctggttgcccatttccgtgatcacggcaccgccgtaagagtgcccgaccaacaataccggtcccgcttgctgcgcgaccatcttgcgcgtacgttccgcatcctcagccagcgacgtcaacggcatttccaccgcatgaatcgccgtatatcccctgcgcgacaactcgatgatgaccttactccagtgcgcggcgccgccccagaatccgtgtaccagcacgatagttggttttgtgctcattgccgactccttcatctcataggaaagcgccgcaggcagatgaacgcccccgcaaggggcgagcctggctgccttcgacgccacgcagtcccccttttatatagtcagcctcatggcgttcagcaatagctacgacgagttaacgtccccgattttccaccgccgccacggcttatcgaagcggcttacgccgcacggccgggaaaaaaaaggattaaaactaggatttttacccataccgatctaaaatttcgcgcaaaaacaaagagaagtaaatttggctcaccgggaaaaggaatgaagttgtgaaggaaatgatctccatcgtttttatggcatgcctgctagcgctgctgttttcgtggctgttcgtctacggtcttaacattcattaaacccataacgacaaccatccccctccctggcaggcaagcggcgtatcgcgactgatgcgctaaaaccggcgcctgaagggttcacgtaccgccaaacccgacgccacctcaccttaaccttgctgtccgcaaatacatcattaatctttatgagtcataaccccaccgcgtttcccccttcaccgactcttttactactcagcggagttcactccagaaggatggctcgcctgacgcaaaatgttaccggtaactatgctgttgatttcttttggcaataaacataaggccgctaataaccctacgttctttatagaaataaattatgcatacttatggataaaggtttgaataaagggcctttggtcattgattatcacccgccaagctcctagaattcgcgcgtaaaaatacaactgggatcgggtttcatgtcgccgctgtgggtcgcaacgcaatactgttattttattggtctgttagtttctatggttttcacctacctggttagccgggacaccgtcaaaattcgctgtatcagcgcactgaccatcgggttaacctggccgttgagcctgccggtggtgttgctgttttcgctgttctaacgccccaatgccgcgcgctggcttttaaacagtcatattaatgaaaagaggctgaccaccggcgtcatggtttttggcgtgggataaaaaagtgccagcgcaaggctggcatgaaaacgggaagcaatgtgagcaatgtcgtgccggatcggggggctcagaaggagacaacccttttcccctcactggtgaataaaatgataatacgtctcattattgaatacaaagtcatttccccaggcaactttcccccttgagaaactatcagccgcgcggcgatcgccagcgctgatacaatcgccccgccccccacaccagcagccagagcaaagcgttcaaccccaaccatagcatcagcaagtagaagaaagtctgatagccgggtatgccccgatcggccaaaaacgggttgaagtgaaaaaatttgacgatcgcgaacggattaagattgaaacggttgaacacgaccgccgtcagcaacggtggcaacagcgtataaaacgccaggctgaacagcagcaggatttttgtgcccgaagtgtttttataatctttcatatcaataaattatatctgtcatcatagtgcaaaaaccgccaggcattcgtacgccaatcgaccccgcgggcgcaaaagagttccaggccaacgcggaaataaagccgatcccgcgtttaattgtcatttagcgctcgggtgatatataccctgtggattttaaattacgatgtcgccgcgccgtcttcaagcacagcgtttacatggcatcatcaggaggcattaatgaaaccggacgcactctccctgccgccgaccccgaaaaagctcaaggtcatctacggctggtatatttatgtgatctatatcctgctggttttcaacatttatatggcggtctacaacgtctgcgttcggcacccgatcgaggccccgctgctgtcgctgtttcacagcctgtttctcgcgttgatgctgcagcaggtgctcaagaagaacgtcgttttcgcctggatcttgctgagctattttattctgatgcgcctgtattacgccaatgtgctgcatgttgagttcacgctggtgagccgttgcctggtgctgctgattctgacgctgctgctgaccggcgccgtagccgtcgggcaactggccacgccgccgcagcggcatgactggctggcgcggctgggctggcggcaatggggggcactcacggcgctggcggccatcctgacaccgctgattaccaccgactatctgggataaactgggggctatttgggaatatgaggttcggaaatgtctacgacgcggcatattttggtgtagttacccgccttctcacagatcttgtccgtgacgaacatgctaaggtagcccagcaacagcaagtagccgaccatgcacagaataaagataagcgttctcaccgatagcgaccaacctgacaagagtatcacgagcatcataacctgaacgaggcgctttaaaaggatttcatgtgcgcaccggccgcatcggcgcacgttctgtagtaacattaagccaccacgcccaccaccggaaacgccgatgcaccatctgatgttagacattgaaaccctggatataaaacccagcgccgtcattctggtggttgcggcggtgtttttcgatccccggaccggggaactcggcgccgaattcgaggccgccgtcagcagtcagaaagaccaaccgggccgtaccatcagtctggacacggtcgcctggtgggcgaaacagtccgatgaagcacgcaaacaggccttcggcggcaccgagagcctaaagcgcgtgctgagcagcctcagccgctttatccatatgaacagcaccgatacggtaaaggtctgggggaacggcaaagagttcgactgcgcgatcctcgaacacgccttccagcagttggaaatgccctgcccgtggaagttttgggatactcaggacgtgcgcacggtgatcacgctggcggaactgcatggctttaacccgaaaaaggctcgcccgttcgaaggtatgccgcatcgtgcgctggatgatgctcgccaccaggcccgttatgtggccgataccgtctcggcgctctattatcgtcagggggcgcagcgctgacccgctttgccccttttcatttgccgccagagtctctactctagccctctttgtcactcggacgtgccttttctgttatgcaaaagtttctgtttatgcttctcagcctggtgctgctcggcccattaggcatcgatctttatctgccgactattcccgctattgccgtcggtctgggcagcagcgaagcgttgatccaatccaccatatcgctatttattctggtacttggcctcggccaggtcatcgccggcccgctggtggataactatggccgcaaaccggtggcgctggccggcattatcctctacatgatcggcgccgcgatggcggcgctggccaccagcccgacgattttcatcgcttcgcgtctgctgcaaggggtggcagtttgctgcaccgccgtcgtcgccttcagcggcgtgcgcgatcgcctgaatggcgacgacgccgcccgcgctttcggctttcttaacggcacgctgaacatcatcccggcgctggcgccgctgctcggcggcctgctcgccgaagccttcggctggcgcgctcccttctggttcctggtcggctacgcgctgctggtgttggcgctcatcgcgctgcgcctgccggaaactcgccccgccgacaccgtgccggtcaaggggttgccggtgcgtcaatacgcgcgcatcctcagcgaacggcgtttcctctcttttgcggtggtgaactccggggcgatgggcatggcgctgacctacgtttctctggcaccgaacgtgctgatgggcaccgccggcctgacgccgctgcaattttcgctggtgttcggcgccaacggtttctggatcatgctggtcagcttcttcgccaaccgcatcatccacaaggtcggccgtccggtttgtctggcgaccggcggcatgttgatgggactgggctgtctgggcctgctgctgggcgtcatgctgctgcccgcgacggcgcaaacgcactggctgacgtatatgctgccagtcgccagcgcctgcgccgggttggcattcgtgatgggcccggccaccagctacgcgttggaaccctactccaatgaggccggcgtcgcgtccgcgctggtcggtttcgtgcagatggcgggcggcgccgcgctgggtctggtggcgatggcgttgccgctgcaacccaagctgtcgctggcgctggtgatgctggcgggctgcctgctggcgctgcacgcgcggcggctcagcaagcagattaaagggcagatcagaaaagtcgcctgagccccggctcaggcttcgatggcgaccggcactcgcgccgctaacgccgacagcagttcatagcctaacgtccctgccgccgtggccacctcatccaccggcaggcgtttcccccacagctcgacttcggcgcccagttcgacttgcggacagggcgtcagatccaccgccagcatatccatcgataccgttcccagggtgcgcgtcagcacgccgccaacccataccggcgtaccggtcggcgcatgacgcggatagccgtcggcgtaaccgcaggccaccacaccgatacgctgtgcgcctgcggcgctgtaacggccaccgtaacccacacgatcgccagacttcagctgctgaatgccgatgatttcactgctcagcgtcatcgcgggctgcagccccgtcgccgcaatgtcattccagcaaccgctcggcgaagcgccatagagaacgatcccaggacggatccaactgccgtgggtcgaagggtgccacagcgtggcggccgagttggccaagcagcgcggcaacggtatatcgttagccgccgcctcgatggtggccatctgctgcgtcacgccttcggggccgtcggcggtggcgaaatggctcatcagcgtaagctcggcaatgttggctaccgcctgcgccctgcgccacacctcatgcagccgctcgggtgcgaaccccagccgattcatgccactgttcactttcagatagacattgagcggcgcgttcagcgtggcgtctgcgatcgccgccagttgccagtcgctgtgcaccgccgtcgtcaggcgataacggtcaagcaacgccagatcctgcggctggaagaagccttccaacaacaggataggcccttgccaacccgactcgcgcagcagcaccgcttcggccagatccagcatggcgaagccgtcggtttgcgccatgctgcgccaaacgtgtttgatgccgtggccataggcgttagccttgaccaccgcccagactttggcgccgggggcgaaacggcgcaccacctgcaggttattttcaatcgcgccgagatgcatcgtggcggttatgggacggggcatcgcttctccttggggcagcgtacggcggccacgcgcgcctgcgcgtggccgggaaagtctatgacagagtcaacgattaacgtgcgggatgcacgtcgttcagcggaaccgcgtgttgctgacgaaacccggcgctgtaacgcgccaccgccaggtcatcggaagggatcgccggcgtaatgccggacatcagatcggacaacaactgcccggagccacaggccatcgtccagcccaacgtgccatgcccggtattgagatacaggttcttcagcgaggtgcggccgacaattggcgtaccgtccggcgtcatcggccgcaggccggtccagaacgctgcctcttccactcggccgccgttcgggtagagatcgcgcaccaccatttccagcgtttcgcgccgtttttgctccagctgcgtattgaaaccgacgatctccgccatgccgccaacgcgaatgcgctggtcgaagcgtgtgatggcgattttatacgtctcatccaataccgtagagaacggcgccgccgcttcgtcggtgataggaatggtcaacgaatagcccttcagcgggtaaaccggaatggacaccaggccgcgcagcagtgccgtggagtatgagccgaacgccaccacatagctgtcggccttgaacacttcctcgccgcactgcacgccggcgatcttgtcgccctccaccagcagacgatcgacgctgcggttgaacaggaaggtgacgcccgcctgctctgccatcttcgccaactgttgcgtaaacagctggcaatcgccggtttcgtcgttcggcaactgcaggccaccggtcagcttgtgcgccacctgcgccagcgccggctcgacgctgccgagctggccggcttccagcaatctgtaaggcacgccggcatcttccaataccgcaatgtctttcgcggcgttttcgaactgttgttgagtgcgaaacagctgcagcgtgccgccctgacgaccttcgtactggatgccggtttcctgacgcagcgccttgatacaatcgcggctgtattccgccaggcgcaccatgcggcctttgttggtcatgtagtgttcggtgttgcagtttttcaacatctgccacatccagctcagctggaagctgctgccgtcgaggcggatggccaacggcgcatggcgctggaacatccacttgatggccttcagcggcacgcccggcgccgcccagggggcagcataacccggtgaaatctgcccggcgttcgccgcgctggtttccagtgcggggcctggctgacgatcgatcaccgtcacctcatgccccgccttcgccaaataccaggcactggctacgcccaccactccactacctaaaattaccactcgcatcgctgactccagcccaaggcttcacaaagcataatcttctgcttacaggaaattaactcagtgaaaaaatccgtccaacaacttcgtcatcaaacgtgacaatattcacaattaatttatcgtcgatgggccatgtatttgcaatagccgtctgcaaatagcgataagatgcggtttagaagggattatggcgtcataccgccactgaattgacatcaacgctatcaatgatagcactcaaaaaaggcgtaataagcaacattgatttaacagaatataaaaataccagccaacacttaaatagaataaaaatctaataaaataaaaaataccaacataacaaacaaagagagccccctccctccgcagcagaaaaatcgcgcaaaatttcagctaccgttaaccttgcttttagtgccggaataaaacacccgagcccttggcccgccgtttatgttgaacgctgcagcacgatatgaacgttaaagccagaagcagcgcctaaagttcacactgtcgctattgtggagaacgtcttatgttcatcgccatctaccagttttcagtcaaacccggacacgagcacgcctttcgccaggcttggctggcgttgacccaaggtatctatctgcagcgcggcagccttggctcgcgcctgcatcgggatgtgggcgggcagtttatcggctatgcgcaatggccaagccgagtcgcatgggaaagcgccggtgatattcagttggatgaacgctacctgcaagcccgggaacgaatgcgtgcgaccttgttggcagataaaacgctatttgaaatggaagtgacggacgattacctgcaaatcagaccgtttgactgagcacaagcccacacaagcgggcttgtggttgcgggaacgagcagcattaatgatgcagcatctcatccacgacttctttggtttgcagttggaatgggtagtaagtcggccagttatccatctctttcagcaacgcttcctgcgacgtgttgcccataaagatatggaaatgcgccgatttgcgcgggccgataatgtgatcgctgaactgcacgaatttcggcgccaggctgccggcatcctggcattcaaacagataacgcacgccctttttaccggaaacatacgtcaggatcttatgcccggcgtacttatactgacaggcgctggattggtcaccgcggtgaaattccatgatgccgttttcaatgccgatggtatccacatcggtggcataccctttgcggtaatacgccttcacttcggcgaaggtcttgcgcttgtcctgtgccgctttcttcttgaacaccgggtcaagatccccattgagcagatagggatacacggattgccacacgccctcccagtcggccagatcgcgatctttgacgtccttatcgtcgaacacgcctccctccgcctttttttccgcctccgtcagcggcttgccatgtgaatgatgcccgtgggcgcatgcctgcccgctgataaacaacgcggccagcgccaccgccagtttgccaaaatgcctcgccaaaatgcgctccttgtccgttatcgagaaaaattaaaagttacaatataacataacaattttcaatccttgtcgtgcatcaggcattgtgttgcgcccccctgccgcagggttatactcgaagaggaagtgcggtgccgcaccgccttctgccgggacaggcgccggattgaccgccgttcgctcctttgcgtaccggcatttttatttcactgatttgcaatggttaattatgacttgaactatgcttgttacagggtctgccgtttgagcaagacccgtgaataatgagggtgcgctgatgactacttcaacacatgaaaaggttaaggatgataaacgtctgagcgatggaccggactggacgttcgaactgctgcaggtgtatttggagcagatcgaccgcgtcgccaagcattaccgactcgacacctacccccatcaaatcgaggtgatcacctccgagcagatgatggacgcctattcgagcgtcggcatgccgatcaactatacccattggtccttcggcaagaagttcatcgaaaccgaacagcgctacaaacagggccagcaagggctggcgtatgaaatcgtcatcaactccaatccctgcatcgcctacctgatggaggagaacaccatcaccatgcaggcactggtgatggcgcacgcctgctatggccacaactcgttcttcaagaataactatctgttccgcagctggaccgacgccagctccatcgtcgattatctgctgttcgcccgccactacatcagccagtgcgaagagcgctacggcgtcgatgaagtggagcgactgctggactcttgccatgcgctgatgaactatggggtcgacaggtacaagcgcccgcagaaaatctccctggtggaagagaaagcgcgccagaaaagccgcgaagagtatctgcaaagccaggtgaatacgttatggaagaccctgccacgcgttgaacgcgaagagtcgccggagcaggcgcgccggtacccaagcgaaccgcaggaaaatatcctctattttatcgaaaagaatgcaccgctgctggaaccctggcagcgtgaggtgttgcgcatcgtgcgcaaggtcagccagtatttctacccgcaaaagcagactcaggtgatgaacgagggttgggccaccttctggcattacaccatcctcaaccatctgtacgatgagggccgagtgaccgagcggtttatgctggagtttttgcacagccacaccaacgtggtgtatcagccgccgtacaacagcccgtactataacggcatcaacccttatgcgctgggcttcgccatgttccaggacatcaagcgcatctgccagtcgccgaccgaagaagaccgctactggttcccggacatcgccggaaaagactggctggagacattgcacttcgccatgcgcgacttcaaggacgagagctttatcagccagttcctgtcacccaaagtgatgcgcgatttccggttgttcaccgtgctggacgacgatcgcaacaactatctggagattgccgcaatccataacgaagccggttaccgggcgatccgccaggagctgtcagcgcaatacaacttgagcaaccatgagccgaacattcagatctggaacgtggatctgcgcggtgaccgctcgctgacattgcgctacatcccgcaggaacgcgcgccactggataagagccgccgcgacgtgttgaagcacctgcatcgcctgtggggcttcgacgtgatcctcgagcagcaaaatgatgacggcagtgtagagttgctcgatcgctgcccgccgcggcctacgccgctgtaaccgcccttgccccgccacaacctataaacatagtcagggagtggcaggggcacattgagcgcctctacgactatagacacaagggaaaattcctaaagcgtgacatccccctttttcactttacaaaattgacatacctttgcattatgccaacgtatttactccaatgcgctcagtgattatttaatgctcagcgagtatccaggtggactaatggaaaatgtagtaaaagaaacagtaaaaaactatagacgtgatattgacggcttacgtgccattgcaataattctggttgttctctatcactcgggagtcggttttctcagtggtggttttatcggtgtcgacgttttctttgttatatcaggcttcttaattggcggaattatctatacagaaacaacacagaataaattctcttattcaaaattctatgtccgtcgaataaaacgaatcgcaccggccttgattgcaatgctgatagtatgctctgcctttgcctttttctatctatctgcattagagctaaaagacttcagccttttttccagtgcgacaatcttatccgttcctaacataatgctttggcataaaacaaactatttttcgccaagtgcagagttaaatccgttattaatgacgtggtcattaggcgttgaagaacagttttatattttcctgccaattattttctccattattgtcaaggcaaatattaaagtagttaagactatttctgtactatcgatagcctcttttattctttgcattatccttacaaaaacatcacctctcttttcgtttttcatgcttccaactcgggcatgggagttgggtgctggcgtaattatttcaataatgcataaagagggacgattcaacagtttgaaagcttcacatagagaatggctttttttggccgggctcgcaatgatattatttgcagcgctaacttttgacaaaaaaacggagttcccaggttattccgccaccttacccgtgctcggttcgatttttttaattctaagcaacggtaagttaagctcaatcattcttggcaaccgtgtgatggtatttattggattagtatcttattcttggtatctgtggcactggcctctgctttcttttgctcgcataggtatcgacgagagactgtcattacatgccggcttactgatatcaaccgttgccttatttattgcttacctctcctatctctttgttgaaactccattcagaaaaagggttcacctatccaatccgaagatcatttttggttacatcttggtttcagcagcattgctcttaccgaccgctctcggttatctcttgaaaggtataccacaaagactcagtccggaggtcgtgcaagtcgacaaggacaagttagagagagttgctgaccgttgtctggtagggtatggagcaaaaacctactctagagatgaaacctgcctcccaaactccagtcaggatgccgttgctctcgtgggtgatagccatgcagcggccttacgaggcggcgttgaaaagtatgcgaaaaataacaatttagtcgtgtatcaaattaataaagcttcatgcccaatgctggttggcgcaacacgaaccattaatacctacccagcacatggtgctgaatgtgatgagtttaataaaaatgcattgaaccttataagtgaaaacaaaaaaataaaaactgttattatctccgctttgtgggactcggccatctatgataatagtggaagctacaaaagtactgtaacgacagaaactggaatatctgctttaagctcaggccttaatgagttagtaaaccaattaaaagccgctcgcaaggaggttataatagtcagtgatgtcccccaacttgacttcgatgtagttaaaaacatcgacaatcaacaaatacccttacgcaaattaataaacagtttactttcaagagaaaaaacagcaggtgaatttaccgatcgctatcaactgccacactcggacgtaaacgacttattgacttctattgcacaagaaaaaggcattagaaaattcaaccctgctgataacttatgcgataataccggctgcaagtttaagtcaaaagatcgtccgttttattatgacaaccagcatttaactacgttaggcagtatatatgctctgcacgggctataacgaagtttaaaaccacccttggcaccggttcttccggtgcccttcatgataatttaataaacctcctaaaaaccactaacatgaatttcactggcctattttaagctaaagatttaacaaactgtaatgaaagaacaaatagttcatctaaaaaccaccacatcatctcctgataataaagacatcctgaaaaattagaaaaaaaactcacagtgtaaaaattacactgtgagttaatatctattaaataattgctatgagagccgcaatcagcgacgcgcttcggtcagatcgctcggcatggtgccctgcatgctctgccaaatcgctccgctgtctttaccgtagctgcgcacggtatccatcacctggtcgtacaatttctcatggcacagcgtggacagcttgctgtagaaggccagcgccagcttgcgcgcttccggattggagaagtagtaacggcccacgcgggtgtacagccctttcagaccgttgaagatcaggccatagatcgggttgccggaagcgaacgccagaccacggaagatctcatagtccaggacattgaaggcatccgcctgatcttccacctcggcggctttcgccagcacttcctgcgcctgctcaggatgattgcgcaccgcagcgcgaataaagatcgacgcgatattggtgcgcacggacagcaggttatcgatcagctgagggacgcttttgtgatcgagacgggccaccgtctcaaggatattgaggccggacgtttcccaaaaattgttcactttggtcggtttaccatgctgaatggtcaaccagccatcgcgggccagacgttgcaacacttcacgtaacgtggtgcgcgtgacgccaatcaactccgaaagctcacgctccgcgggcaaaatagagccaggggggaagcgattattccaaatactctcaataatgtactcttccgcgaaaccggcaggactctgcgcctttatgaccatgtgtttgacgttccgttgcgacgataaaatcagtaaaagtaatcagctcatcataccagatcgtgctgacatgacatagcgtgagcgaaaaacaataaacgaaagtgtgcataacgtggcaaaaaacgcgcaaaaacaccggccctgagaaatttgccgccgtaaaacaagctccggttgcgcccgcccccgccgcgttgttagggtacgtgctacgactgatttaaggatgcataaaggacaatggaaacaaccctgcgcagcgccctgctcaaaaacttcctggggcaatctcccgactggtacaaactgaccattctcattttcctggcgatcaacccgctggtgttctttttcgccagcccgtttctcgcgggttggctgttggtgatcgagttcatctttaccctggcgatggcgttgaaatgttacccgttgctgcctggcggcctgctggcgctcgaggccgtggccatcggcatgaccagcccggcgcaggtctcgcaggaaatcgaacataatctggacgtgttgctgctgctgatctttatggtggccggcatctactttatgaagcaactgctgctgttcgtgttcaccaagctgctgctcaacatccgctcgaaaacgctgctgtcgctggcgttctgcctggccgctgcctttctttccgccttcctcgacgcgctgacggtcgtggcggtggtgatcagcgtggccaccggcttctattccatctatcacaacgtgacgtcgaatcgccccgacggcgacatcggcgatgacagcgattttatcggcgaagagcgcaaacagacgctggagcaattccgcgcctttctgcgcagcctgctgatgcacgccggcgtcggcaccgcgctcggcggggtcatgaccatggtgggcgagccgcaaaacctgatcatcgccaaaaacgcgggctggggttttatcgatttcttcctgcgaatggcgccggtcacgctgccggtgttggtgtgcggtctgctggtttgttggctggtagaacgttttcgcctgtttggctacggcgcgcagctaccggaagcggtacgcgacgtgctgaaagagtatgaccgcaaggccactgcgggccgtagcaaacaagaacggctcaaactggtgatgcaagcgctgatcggcgtttggctggtgctggcgctggccttccacctggctgaagtggggctgattggcctgtcggtcatcgttctcgccacctccctgtgcggcgtgaacgacgagcacgccatcggcaaagcgttccaggaagcgctgccgttcaccgcgctgctgacggtgtttttcaccgtggtcgcggtcatcatcgagcagcacctgttcagcccggtgatccagtttgtgctgcgcgccgagcccgcttctcagctttcgctgttctacctgttcaacggcctgctgtcgtcggtttccgacaacgtgttcgtcggcacggtttacatcaacgaggcgcgcaccgcgctggaaaccggcgctatcgggctgaagcagttcgagctgctggcggtcgccatcaataccggcaccaatctgccctcggtcgctacccctaatgggcaggcggcgtttctgtttctgctgacgtctgcgctggcgccgctggtgcgtttgtcgtatggccgcatggtatggatggccctgccttatacggtggtgctgacggtggttggcctgctgtgcgtccagttcaccttggaaccggcgaccgagctgttgacgcagtggcactggctgacgctgccgtccatcgacgccgtcggccactgagacggcgccggcagggtgaaccgactatttttacgctgaatccggcccaggtggctggcagcgaagaggaattggtttacactgccggttcaattgcttactgcatggaagaatctagatatgttgcaattctttaaccgctgttcacaaggacgcggcgcctggctgctgatggccctgacagcgttggtgttggaactggtcgcgctctatttccagcacgttatgctgctgcagccgtgcgtgatgtgcatttacgagcgttgcgcgctgttcggtatcctcggcgcctcgctggtgggcgccatcgcgccgaaaacgccgctgcgctacgcggcgatcttgctgtggatctacagcgcctgggaaggcgtacagctggcgtggaagcacaccatgatccagttgcatccttcgccattcaatacctgcgatttcttcgtcagcttcccgtcctggctgccgctggacaaatggctgccggcggtgttccacgcttccggtgactgctccgtgcgtcaatggcaattcctgacgttggaaatgccgcaatggttggtcggcatcttcggcgcctatctgctggtggcgctgattgtgctgatcgcgcagtttgttcgcccacgccgccgcgacctgttcggccgctgatcggcagacaaacaaaaaacggcgccggaaggcgccgtttttttaggtattgctgccacattccgagataaagccacctcaggtatgtgtaaggaagtaaacgagcacgatcagcgctccagctacggcaaacaggcggatcattttcattgttatactctcgaacttgcgggagaacggccaaattacccaacttatcgtttaaaaagaagcatcccggcacaattaagcgcgtaatttacataacattaaacttctgcgatatcggcgactaaaaactggccgctctggctcattcctttcagccttcgagcatcaataaattaccgttacttatgaacgactgcacctttgtcacattcagagcacaatattttggtgaagtttacccataaaatccttatagtatcggcaaagtgagtactaccgatttccctggtgttgttgtgtgtcttgcccctcatctttgcaggggcttttttccttctcccccaaccgtcagtccccgctgcctttaaataaatcattcaaatttaactctgcgcggtatcactcatcggccatcgctcgcgcactaatgattaaaatcgttcgtgattctttccttatgctgaaagcagtaggccaatgacatcaaggacacgatttatgccggataccacattgcccccttcgtctcagcgccccttcctgcggcgcatgctgctcaaagccgggaaaaaattcctgcgctggaacggcgaatttcagactcgccattcgctcatctccaccacgccgcggatcggcaatcatgaattccattgggtgacggcgctggaagcccgttggccggccattcgcgaggagttggatcggttactggagcacccggaggacatccccgcgttccatcaaatatcaccggatcagaaacgcatctctaaaggagataactggaaaaccttcgggctgtttgtctacgggcaacgggttgatgaaaactgcgccatctgcccgcgcacagcagaggcggtcagcgagatcccgggcatgcgcaccgccatgttttcaatcctcaaaccgcactatcacatcgtgccccacaagggcccgacgcgagccgtcgtgcgcgcgcatctgggattgatcgtgccaaaggatcgggacaagctctggatccgcgtcgacgatcagatcctgcactgggatgaaggcaaggtgattttgtttgatgattcttatgaacacgaggtccgcaatgataccgacgagctgcgcgcggtgttgtttctcgatatcgaccggccaatggacaaagtgggcacggcggtgaataaactgctgttcagcctgatcaaagccagcccgtatgtgaagcagccgctgaaaaatctggccaactggcatcgccgagataaaaaagcgtgaagcaagagtctcacgcgcgtaagctcaatagccaagagggcggaatgtcttaacacgccgccctctggcattaaaactcgtgttgccgagcaacatctgtcaaggtatccgcgttatctggcccagtccggcttgttgaggatatgatcctgccagtccaccacttcactctcgcgcactgcgatatgccgcaccgtgatgcgctcgccgtgcatcgccgctttggagccgctgatcagcgggtgccaggggaacagcggctttccttcgccaatcagacgataggcgcaggtcggcggcagccaatcgaaggtggtgagattttcgcgcgtcagtttgatgcagtcttcttccagctcgaagcgccgctcgtagttgcggcattggcaggatttgatgttgagctggttgcaggctacgttggtaaaataaatctcgtcggtatcttcgtcgatcagcttattcaaacagcattgcccgcacccgtcgcacagcgattcccactcttgttctgacatttccgccagcgttttctgttgccaaaaagcgagttgtgacatgttagcgtccggtttcggtaaatggataagtcacctgcgagcaggttcgaggggggactatatagacattttagccacaagatgcaagctttgccgccgacgatgccggcggcaaggagaaatcagatcacccgggtgctgagcgttttgccgttcaggctgattttcagcatgtcgccggaagccatcgggcccacgccctgcggcgtgccggtcaggatgatgtcaccggcgcgcagcgtgaagaagcggctcatgtagctgataagcggcaggattggcgtgatcatgtcgcgcgtattgccctgctggcgcaattgatcgttgacggtcaacgacagctcggcgttttgcggatcgccgaattccgccaccgggataaatcccgacatcgggcaggaaccgtcgaaggccttggccttttcccacggctggccggcctttttaaagcccgcttgcagatcgcgcagcgtcagatcgagcgccacaccgtaaccggcgatcgcccgcgcaacgcgatcttcgttggcctgtttcaacggtgtgccgatcaataccgccagctccacctcatgatgcaccgcaccgaactctttggggatggccaccggctggcgaatatcacacaacgccgtttccggtttgataaacaccaccggctcgacggaaaccgcgctgcccatttccttgatgtgatcggcatagttgctgccgacgcagactaccttgttcaccgggaaatcgagcaacgaaccctgccagtctctatgttgatacataccgcttctcccaaactgtagaggcttggcgcgccaagccgattattggtgtgccggatcaatgcccgatcgcgtctgccatcatacccacggcgagagcgaaatagtaagagcgattccagtgcatgagggtgcggaaattatcatagaccaggaacgtccgcccctgcagatcatccggcgcgataatccaaccgcgctgcacggcatgcggcaacgcactgccatccgcgcggcgcacgccgcgtttctgccagtcgttgacgctgcgcgcctgcgcgtctttcaggcccagttcggccgggttgaaaccggcgggcaatttgacctcgcgcccccaaccgatgccgggctgccaaccctctttggacaaatagctggctgtagacgcgaaaacgtcgtcaatgttattccagatatcgatgcgcccgtcgccgtcgccatccgcagcgtagcgcaagaaggagctcggcataaactggcattgccccatcgcgccggcccaggagcctttcagcggcgtatcgccgacgtgcccctgctcaactatctgcagcgccgccatcagttcctggctgaaaaaagcttcacggcgcccttcaaacgccaaggtcgccagcgcagacaccacgtcttcccgcccctgaatcttgccgtaggcgctctccatcccccacagcgcgatgatataacgccctggcacccgatagcgctcgctggcccgcaaccattgcgcatggcgcagccgatacagttcgcgcccctggcgcaccttggcgggcgacatcacccgccgtagatagtcgtccagggttaccttctgctccggctgattgcgatcggccttgatcacccgatcgacgaaatggatttgcgcaaacgcgcgatcaagggtggcctgactgatgccctgttcccgcgcccggcgcttaagttgatcgacatacgccgggaactgcgccggatcgcggccgctcgccgccagcgtcgtctcctgcgccgcctgcgatgcgccgggcatcagcaccccgcccagcgccaaccaggcggccaatacggtctttctcgccgaacgtgtcatcgcgcctcccctggccgtggcgactgtctcaggccttatcgcccgccagatgctgattgagcaggttttcaaccggcggcgggaactgcagataatagccttcgtctttcaacgcctgcttcaccttttcgatatccgccgaggccaattttttgcgctcatcgagcgacagcatcatggcgaattgcggcacgccgaaacttttcatcagctcttccggcacacgagagaaatcgtcttttttttcgacataaagataagtttgatcgcgtttcgggcttctatagatcacacaaagcatttttttaactctatttaattgagggagcgtcttgcctggatataactctgactataacatgcttatagtacatcggaatatcgcaccccgagtggtattccggggatttaaagttgctgagactgagtcaggatagatgtcacaatcgccaattgagctaaaaggcagcagttttaccctatcggttgttcatttgcataattcgcagcccgaggtaatacgccaggcgttacaggaaaaagttgagcaagcgcccgcttttctgaaaaacgcccctgttgttatcaacgtcgcaacgctggaaggcgatgcgaactggaaagaacttcaacaggctgtcgcggcagcaggtctgcgcgttgtgggtatcagcggttgcagagatgagcgtcaaaagcgcgcgatagcccgcgccgggctgccgctgctgagcgaaggcaaaggccagaaaatggcggcgccggagcctgcaccagcgcccgtggtggcggataacgcccccgccaaaacgcgcatcatcagtacgcctgtccgctccggccaacagatttacgcccgcaacagcgatctaatcgtgaccagcagcgtcagcgccggcgccgagttgattgccgacggcaatattcatgtctacggcatgatgcgcggtcgcgcactggcaggcgcgtcaggcgacacgcaatgtcagattttttgcacccacctggcggctgagctagtctctatcgcagggcagtactggttgagcgaccaaatcccgtccgattacgtcgggcaggccgtacgactcagcctgttggataacgctttaaccatacaacctttaaattaagcccttttgacaaggaatccatttcatggcacgcattattgttgttacatcgggtaaagggggcgttggcaagaccacttcgagcgcggccatcgctaccggcctggcccagaaaggcaagaaaaccgtcgtgatcgatttcgatatcggtctgcgtaatcttgacctgatcatgggctgcgaacgtcgggtagtttatgatttcgtgaacgtgattcagggcgatgccacgctgaatcaggcgttgatcaaagacaaacgcactgaaaacctctatatcctgccggcttcgcagacgcgcgacaaagacgcgttaacccgtgaaggcgttgaaaaagtcctcaacgatctcggcgagatggattttgacttcgtggtctgcgactcaccggccggtatcgaaaccggtgcgctgatggcgctgtatttcgccgacgaagctatcatcaccaccaacccggaagtctcttcggtacgcgactccgaccgtatcctgggcattctctcttctaaatcacgccgcgctgagaaaggcgaatcgcctatcaaggaacacctgctgctgacccgttataacccgggccgcgtcagccgtggcgacatgctgagcatggaagacgtgctggaaatcctgcgcattccgctggtgggcgtaatcccggaagaccagtccgtgctgcgcgcttccaaccagggtgagcctgtcattctggatgccgagtcagacgccggtaaggcgtatgacgataccgtttgccgcttgttgggggaagaacgcccattccgcttcattgaagaagagaagaagggtttcctgaaacgcctttttgggggataaaccatggccttattagacttctttctgtcccgcaaaaaacagacagccaatatagccaaggaacggctgcagattatcgtcgcagagcgtcgtcgcggggacagtgagcccccgtatctgcctgatttgaaacgcgatattctggcggttatttgcaaatacattcagatcgatcctgaaatgctgcatgtgcagttcgagcagaaaggggacgatatttcggtacttgaacttaacgtgacattaccggaatcggaagaagcagctaaatgattgcgacgcattaattaccccctgtatattttatgcagggggtaactgtatgttcatccagttattaagcattatcggcagcaaaaaatcgatttttccctttgggacaattcccaattaactttgccgccacctcgtttaaagtaaattctggccagatttaccttcaacgcattatttcctgcctatattcacccgagcagagtttccctaccctgccctggtgataaccagcgattaataatctttcaggatgtcctgcaacggcaccattaataaatcgccgcgccagccgctgattaattcagggcgactctcgccgtccttcagtttccaatgccagttcaacaattggttaatttggcgacgggatgccagcagctcgctgctcaacccgctttgctcgctgacggtagcgatcgccgccttgatgtctttgaacaccttcttgtagcccggctgatcgataaggttggccaacggcgccggcaactcggactcgtccagcgcttcggcctccgccaccagcgccagcagcgttttaccgtgataacggatctccggcccgctcagacccagcgaatccagttctcccagcgaagacggcatatagcgcgccacctgccacaggttctcctcacgcaccacaaagttcaccgccagatcgcgctcacgcgcctggcgcagccgccattccgccaacttctgcagacaaccgagctgacgcgggcgcagctgccaggcgttgctgatttcgcgataggccaatgccggcgccagcgtctcgctacggcgctggcacagcagcaggcactcgttattggccgccgcggtccaaccggcctcttcggtctcctgcaccaactgtttagccatcggcagcagatagaacacgtcggcggccgcgtacacgcattgcctttcggtcagcgggcgcgccagccagtcggtgcgcgactcgctcttgtccagctcaaccttcatatactccgccaccagcgtcgcgaagccacaggagagcggccggccggtaaaggcagccaggatctgagtgtcgaccatcggcgtcggcagcgttttaaaggcgttgagaaacacttcgagatcttcactgccggcatgcaggaacttcaccacggcggtgtcggccagcaggtcgacaaacggctgccattgcttgatcggcagaggatcgataagggagagttgttcaccgtcgtagagctggatcaggcccagctgcggatagtaggtgcgcgttctgacaaactcggtgtccagcgcaatctgggcatgctttctcgcctgctcgcagacctgctgcaatccggcatcggtagtgatcaactgataattcaaaacatcattctcttgtaggattcaaacacaacaacgccggcattcaccggcgttgttgatagtcaggcgcgagagcgacacctaggcggcatcggccggcttcggcgtttttagctcatcgcgcagttctcgccgcaaaatcttgccgacgttagacttcggcagttcatcgcggaactcaacaattttaggcactttatacccggtcaggtgccgacggcaatgggtcaacagctcttccttggtcagcgaggcgtctttcttcaccacgcagatcttcaccgtttcgccggagacctcgctcggcacaccgatcgccgcacattccagcactttcggatgctggctgaccacgtcctcgatctcgttcgggtaaacgttgaaaccggagaccaggatcatgtctttcttgcggtcgacgatgcgcacgaacccctgctcgtctacggtcaccacatcgccggtcgccaaccagccatctttcagcacttcgtcggtggcgtccggacgctgccaatagcctaacataacttgcggccctttgacccacagttcgcccggttcgcccggcggtacatcctggccattgtcgtccaccagacgaatgtccgtcgacggcaccggcaggccgatgctgccgctgtagtgtttcagatcgtaagggttaccggccaccaacggcgcgcactccgtcaggccataaccttccagcaggtgtttaccggtggttttctcccacttctcggccaccgctttttgcaccgacatgccgccgccgaccgagaaacgcagcgtagagaaatcgagcttgtggaactcttcgttgttcagcaacgcgttgaacagcgtattcaccccgctcatggcggtgaacggatatttgcccagttctttcaccagccccggaatgtcgcgtgggttggtgatcagcaaattgcgcccgcccagatcgataaacagcaggcagttcaccgtcagcgcgaaaatgtgatacagcggcaacgccgtcaccaccagttcctgcccttcgcggaacagcggcgaataggcggccttggcctgctcgaggttggcctgcatgttgcggtgcgtcagcatcgcgcccttcgccaccccggtggtgccgcccgtatattgcaggaaggccagatcggcattaatgatgtccggttttacatactgcaggcggcggccgcgctgcagcgcgctgcggaaggaaatggcgtccggcaggttgtatttgggcaccaggcgcttgacgtacttgaccacgaaattgaccagcgtacctttggcggccgacagctgatcgcccatgcgcgtcaggatcacgtgtttgacctgagtgttgaacaccactttttccagcgtatgggcaaagttggaaacgatgacgatggcgctggcgccgctgtcgttcaactggtgctccagctcacgcggggtatacagcgggttgacgttgaccaccaccatgccggcgcgcagaatgccgaacagggcgatggggtattgcaacaggttaggcatcatcagtgcgacgcggtcgcccttcttcaggcccagttcattttgcaggtaagccgcgaaagcccggctgcgttcttccagtttgcggaaggtcatcacctcgcccatattgataaaggcgggctgatcggcatagcgctgcacggcatgctcaaacatttcgatcaacgacgaatagcgatcggcatcaatctctgcgggcacatctgccggataccgttttaaccagaccttatccaaggtattactcctgaaatcattactaattatcatcgcagccctcaaactcgcagcctaaccataacaatattttaactcagcagaccagttcgggttttaaacattattcaggttgcgatgtacgtcactaattgtcggatattccttatcccaaaaaacaaaagggcggcctgagccgccctgtcaaatatgttcacatcaagcgtatgctactcggttacgatggtttgcacctgtgccgggccagggttgtaccagccatagcctgcgccccaaccgggtccccacggacctccgcgccagccccaagggcccatcggcgccggcggcatcaccacctgctgtaccagatgccagcgcttgaaacctgtcacgttcatcgttacgaagcgatatggcgtcatgccgatccgtccctctttcaggccggtgatagggccgacgacggtcaccagctggcctttgaaatcgaccggttcgaggaagccgctcaccgtggccagcaagcggccgttcgacggttcacccagtatcggccgtgcaccgctgtcgagcggcaccgccgcgatctccagcagcgtgcgcccttgttcgttggcgacgttcaccacggtgccgccgaagcgggcttccgcgccggtaaacaggttcggtgcattttgtaccgaggaaagctgagtcaccggcgaagggctggagcctttgatcgcatccggtacggtgacgcacccggtcagaaccagcgcgccgcaggcgacggccagcagcgacagctttttacttgcagtgcggattaacatggtcgcaatctcctgaaatgcctgtaactttgaccgcgtttcagcgttcaagttgcaggccttcatcgcccggcatcaacatcagcacaataacgccgcgattactcgcggcccggcagttttttccaggtcacttcattgcgcagataggtcggctcggcgttttccaccgctaccgccagcccttcttgccaggcctgcagcgccagcggcagcatgtcttgcgcctgcggcaacagcatctggccatcgcgcacgctcagcgtggaaccgttgaccagatcggggtaggtttgccagccggtgccgacgtgggcccattcgccctgcaggcgctgcgcacgctccagcgcctgcgccggcgacagcacggcctcgccttcgttttccaaccagcggccgtccgcctggcgttcgaactgcccccagtaaacttcacccatgcgcgcatcgatcgccgccagcacacgctccgcgccgctgacgcgccaggcgccctgcgccatggtttgcagcgtggaaacgccgatcatcggcagatcggcgcccagcgccaggccttgagcgatgccgatgccgatgcgcaccccggtaaaactgccggggccgcggccgaaggccagcgcatcgagctggttgagcgccaggccggattccgccagcacctgctgcaccataggtaaaatacgttgcgtatgctcgcgtgggcacagctcaaacagggcgtggatttcgccttgattccagacggcgacggaacaggcttccgtcgcggtatcgatcgctaaaattcgcgtggacatgccaacctctggcgggaataaaactgggtttttcatacagggcgcgcattgtagcacagccccgtaagcccttcatctttcacgtggccgacgtgtcggcggcctgcaggaaggcgattgcctgcttcagatcgcgggtgcgcggcgtgggcggcaggctattgaggaacacctcgccgtaagggcgcatcaccagacggttatcgcagatcaccagcacgccgcgatcgtcggtgtcgcggatcaaacggccgacgccctgtttcagggtgatgaccgcatccggcaactgcacatcattgaacggatcgccgccacgcaggcggcaatcttcaatacgcgccttcagcagcggatcgtccggtgacgtgaacggcagtttatcgatgatgacgcaggacagcgcatcgccgcgcacgtccaccccttcccagaagctgctggtcgccaccagcagcgcgttaccggcggcgacaaactgcgccaacagctggcctttactggtttcaccctgcaacagcaccggcagcgtcatcgtggcgcgaaactcttccgccagctcacgcatcatctggtgcgaggtgcacaagaagaagcagcggccgttgttggcttcgattaatggccgcagcatgcgcgccagctggcgcgccccgccaggctgattcggcgaaggcaaaaagcgcggcacgcacagcaacgcctgtttggcatagtcgaacgggctcggcagcagcagcgttttggccttggtcagtcccaagcgttcggtgaagtggcccagctgatcgttgaccgacagcgtggccgaggtaaagatccagctgcccggcttctcgtccagcatttcgcggaaccggtcggccaccgtcaacggcgtcagcgccaacacgaagtggcgcgaattgcactcataccaatagctgtaacccggctccgtcaccgccttgaggcgtttgagacgcgcgcggtacagcgtggcgcgctcaaaggcggcgtccagcagcgccgaacgccccagagacagcttcatcacgtcgtaacacagctccagcgcgtcatcgagcagcaataaagcgcgctgcacgttcggttccccgagcacatcgcgcagattgccgcgaaaacccggctctcccagattaaggcgaaaatcttgcgtgctcaggctgagacggtcggcgcttttttgcagttgggcggcatcgcgcacctcggtgcggtaggcgatggtgatgtccttcgccagatccaacaattggcggctggtgagctgctggccgaaatactggctggcgatgtcggggatttggtgcgcctcatcaaaaatcatcacctcggcttccgggatcagctcggcgaaaccgccctctttcaccaccatatccgccaggaacaggtgatggttcaccaccaccacatccgcatccatcgcgcggcggcgcgctttgaccacgaagcaatcctgatacagcgggcagtcgctgccgagacagttatcattggtgctggtcaccaatggccagacgaaactgtcctccgccacttcgctgcaggtgctgatgtcgccttctttggtctgcgacgaccacttgcgcagctgcaccaaatcgatcagcgtctgccccgccagctccccgccggccatcgactgttgctccagccgctccagacacaggtagttggagcgtcccttcagcagcgccagcttgcctttgtacttcagcgccttggcgacggtgggcagatcgcgcgcatacagctgatcctgcaacgctttcgaaccggtggagatgatcactttgcgatcggcgcgcagcgccggcgccagataagcgaaggttttgccggtgccggtgccggcttccaccaccagctcctgcttgaaattgatcgcctcggtgacggcctgcgccatctgccgctgcggctcacgcggtttgaatcccttgatagcctgcgccaatgcgccgtctgttgcaaaatcgtctgtcacgctgtctctctgccggtgtcattcagcggtgattatgccaagcctgccgcccggctaccacccactttatcgccgcgctttttcatcaccggctgtgctacccttagcgggactatgatatggagataagcaaatgaatatcgaaagaattgatcccgatcagcgctggtccgaagccgtggtgcacaacgagaccgtttactataccagcgtgccggagaacctggatgatgacgcgaccgcgcagaccgccaacgcccttgcagccatcgacgtgctgctggcgcgcgtaggctcggataaaagccgcattttggacgccaccatcttcctggccaataccgccgacttcgccgcgatgaacgccgcctgggacgcctgggtcgttgccggcagcgcgccggtacgttgcaccgtgcaggcgcagctgatgaatccgaaatataaagtggaaatcaaaatcatcgccgcgctgtaagcctgagcgcagacgaaaaaaaaccgcagacggcaacgcctgcggttttttattgcccgctatcaggacagtttaaggatcaccatccccgccagcaacagcgccaggccgatccagcctttggcgtttaaccgctggccgaacatgatccagcccgcagcgatagtggcggcgataccgaaaccgccccacaacgcataagcgatcgacagatcgatgcccttcaccgcttgcgccagggcgctgaacgcaccgagtaccgacagcagcgacagcaatcccagccaaattttacggaaaccgtccgacatcttcaggaagatattggcgatgatttccagcacgatggccaatcccaggaacccaatgtggtacaactcaaactgttgcatggttgtcacctcgcgggctgacctgttttcgctctttgcgggtaccggatttcaccagcatgataccggcgatcagcgtagccagacccagtaccttcagcgcggaaatgggctcgtcgaaccacagcacgctgaacagggtaatgaacagaatgccgataccttcccacagcgcataggccacgcccaacgccacgcgttttaccgctactgacagcaacacataagacgcggtgatcatcacgtacatcacgatatgcccgatcatgccgccattgacgctggcgtatttcatcgacaaggtgccgatgatttcggtcatgatggccaaacctaaaaagatccaataaatcataatttttctcccaaacggcgaataacgcgcgccaaggcatatttatcccgatttatctcgtcgaacggccgcagtacggcgcgcaagacgcagagatccctggggataaactgacccaaacgcaaaaagaatgtttgcccggctgaacggtagagcgaaggcgtaagcccgctacccgcaccggttaagggagaaagacgctatagctcgctgcaccagtgatgctcactggcaaggatcgcagacaggaagagttggcacgtagaggttctgagggtagttccgttaatagtcatcataatagttctctattatcagccgcacaccgtgcgatttgcccaatatcctcataaaagtaaaattttcaactgagatatttttaccacagccaaaataagaaagcaaactgccgttttcatcaaaaagcagaaaaaaacgggttaaaaataagaaagttaatcgagataaaaattaaaaaaggctcaacggagcgttgagccttgcgatacccgcgggtgagcaaataagcgccaaccccaggcctggcgcgggttacaacgcggcgccgctgacggcgctgcgcgccagttcagtgatgcgcgcatagtcgcctttttcgagcgcgtccgccggcaccagccaggaaccgccgatgcaaagcacgcttttcagcgccagataatcgcggtaattgtttggcgtaatgccgccggtcgggcaaaaacgcacctgcgggaacgggccgccgatcgcctgcagcgccttcacgccgccgttggcttccgccgggaagaatttgaattcccgcagaccgtgatccatgccctgcatcagttcagacacggtgctgatgcccgggatcagcgggatgggtcccgccgtcgccgcctgcagcaaggcctcggtcagccctgggctgatggcgaactgcgccccggcttcggtcacctgccgcagctgctgcgggttgatcaccgtaccggcgccgatgatcgcctccggcacctcttcggcgatagcgcggatagactccagcccgcaggcggtgcgcagcgtcacctccaatacccgcacgccgccggcaaccaacgctttcgccaacggcaccgcctgctccagcttgttgatcacgataacaggcaccaccggccccgccgtcaggatctgctcggcgctggttttccagtttttcatcgttatttctccattactcgcggttaacaatggcacgcccctgccacagggctccgcacaaatgcgcggacgtccggccgtaccgtaagtgatgaggcccacgcgcagatcgcaggcaaaaaaaagccggcagacaggctgccggcattacgcattattcgaactcgttccaggagcggccgtcgcgggtgatcatcgccaccgaggccaccggtccccaggtgcccgcctggtaaggcttaggcgcctcgttgtcggctttccatgcgtccatgatggagtcgacccacttccaggcttcttccacttcatcgcggcgcacgaacagcgcctgaatgccgcgcatggtctccagcagcaggcgctcgtaggcgtccgccacgtgctcctggttaaaggtttccgagaagctcaggtccagcttggttgtctgcagacggtgcttgtgatccagccccggcaccttgttcagcacctgaatttcgatgccttcgtccggctgcaggcggatggtcagcttgttctgcggcaactgctggtaagaatcgctgaacaggttaagcggcgggtttttgaagtacaccaccacttccgaacatttggtcggcagacgtttaccggtacgcaggtagaacggcacgccggcccactgccagttgtcgatatccacgcggatagagacgaaggtttcggtgctgctgctcttgttcgccccttcctcttccagataacccggcactttcttgccctggacgaagccggcggtgtactgaccacgcacggtggtttcccggacattggtctgatcgatgcggcgcagcgagcgcagcaccttcaccttctcgtcgcggatgcggtcggtggtcagatccgccggcggcgacatggcgatcatggtcaggatctgcagcaggtggttctggatcatgtcgcgcatctggccggcctggtcgaagtaaccccaacgcccttcgatgcccacctcttccgctacggtgatctgcaccgaatcgatggtgcggttatcccagttggaggcgaaaagcgagttggcgaaacgcagcgccaacaggttcagcactgtctctttgccgagatagtggtcgatacggtaaacctgggattcgttgaagtactccgccacctgatcgttgatcacgcgtgaggacgccaaatcggtgcccagcggtttctccatcaccacgcgcgccggctcatggttcagcttggcttcgcccagccctttgcagatggcgccaaaggtgcttggcggcatggcaaagtagttgatggtggtgcggtgcttctgatccagcattttacccaatttggtaaagttcttgctgtcgttgacgtccaggttgcagaagtccaggcgcgcgcttagcgtggcccagagttcgtcatccagtttttccttcatgaaggtgccaagcgcttccttgaccacttcggtataggcttgtttatcccactccgcgcggccgacgccgatgatccgcgtatccgggtggatgtgtccggctttctctaactggtacagggaaggcagcagcttacggcgcgccaaatcacctttcgcgccgaaaataaccaggtcacacgcctgggctgtagaggttaccgccatgttcatctcctcgttgcaggatatttgtaattttcttacattactaatgtactctgtttgactacggccagcaaacccggagcaaagcagaaaaaaaggcctcaagattccagtggaaagcgccaatgtacgccaacgccctcaccacgggcaaaactgtaatttttcgtcttttttgacgctctgttaccattatgaaagttagacacaggtcatattctggtgaaaaaaccctgcatacgccgtgtcgagactgccaacggttaccagcacgtagtatattttcactaaaccggcattgatttctcctttgtttgaaatcgacataccctatcgattccaggttacagccgctcgtttggcgtctgctcgcacggcgaacacgggcgaaattcgacgctgttgcttgaaagccacagggataaaaccatgagtgactctcgttatatgaatacgctggacaaaatccagagccatctggaacgcctgagcaaatctgaaaggaaagtcgccgaggtgatcctggcctccccgcagaccgccattcactccagcatcgccacgctggcgcgcatggccgacgtcagcgaacctaccgtcaaccgtttttgccgccgccttgataccaaaggctttcccgatttcaaactgcatctcgcccaaagcctggctaacggcacgccctacgtaaaccgtaacgttgaggaagatgacagcgtcgattcctataccagcaagatcttcgaatcggtaatggccagcctggatacagtaaaggcaaatttggatattgccgcaatcaatcgtgcggttgacctgctcacccaggcaaaaaagatctctttcttcgggctgggcgcctccgcggcggtggcgcacgatgcgatgaacaaatttttccgcttcaacattccggtggtctactttgatgacatcgtcatgcagcgcatgagctgcatgaactccagcgaaggcgacgtggtggtgctgatctcacacaccggccgcaccaagaatctggtggagatggcccacctggcgcgggagaacgacgccacggtactggctatcacctcgcgcgacaccccgctcgcccaggcggcgaccctggccctgctgctcgacgtgcccgaagacaccgacgtttacatgccgatggtgtcgcggatcgcgcaattaacgctcattgacgtgctcgccaccggatttaccttgcgccgaggggctaaattcagagataacttgaagcgggtcaaagaagcgctcaaagaatcgcgctttgataaaggcgtggtcattcccaacagttttgattcgtgacccgacgaagaaaaaatcgccgttcaacagacatttgaatgacggcatcagaggcggtaccctgttaacatgctcatacgggtaacccgggtgaaatatcagtgttgtaaaattacatttcacgcctggtttcgttatccgacgttatcgcaacaccaatatttgcttcaccagtcaacggagtaatacatgtccagacggctcagaagaaccaaaatcgttaccaccctgggtccggctacagaccgcgacaataatctggaaaagatcattgccgccggcgccaacgtagttcggcttaacttctcccacggcagcccggaagatcatcaggctcgcgctgacaaagtgcgcgaaatcgctgccaagctggggcgtcacgtcgctatcctcggcgatctgcaagggccgaaaattcgcgtctccaccttcaaggaaggcaaaatcttcctcaacgtgggcgataaattcctgctggacgccaacctgtcaaaaggcgaaggcgataaagaaaaagttggtatcgactataaaggcctgccagccgatgtggtaccgggcgacgtcctgctgcttgatgacggccgcgttcagctgaaagtgctcgaagttcagggcatgaaagtgtttaccgaagtgaccgtcggcggcccgctgtccaacaacaagggcatcaacaaactcggcggcggcctgtcggccgaagccctgaccgaaaaagacaaggcggacatcgtgaccgccgccaagattggcgtcgactacctggcggtctccttcccgcgtaccggtgaagatctgaactatgcccgccgcctggcgcgcgatgccggctgcaacgccaagatcgtgtccaaggttgagcgcgccgaagcggtttgcaccgacgaagcgatggacgacattattctggcctccgacgtggtgatggtggcccgtggcgacctgggcgtcgaaatcggcgatccggaactggtcggcattcagaagaaactgatccgccgcgcccgcaccctgaaccgcgcggtgatcaccgcgacccagatgatggagtcgatgatcaccaacccgatgccgacccgcgccgaagtcatggacgtagccaacgcagtgctggacggcaccgacgccgtcatgctgtcggcggaaaccgccgctggccaatacccggcggaaaccgtggcggcgatggcgcgcgtttgtctgggtgccgagaagatcccgagcatcaacgtttccaaacaccgcctggacgtacagttcgacaacatcgaagaggcgatcgccatgtcttcgatgtacgccgccaaccacctgaaaggcgtcaccgcgctgatcgccatgaccgaatccggccgcactgcgctgatgatgtcgcgcatcagctccggcctgccgatcttcgccatgtcgcggcatgagcacacgctgaacctgaccgcgctgtatcgcggcgtgacgccggtgtatttcgacagccacaaagacggcgtgatcgccgccaatgaagccgtcaatcgcctgcgcgacaaaggcttcctggtctccggcgatctggtgatcgtcacccagggcgacgtgatggaaaccgtcggcaccaccaataccagccgtatcctgcgcgtcgagtaatccacgccgcagacgacatgccggccggctcacgttggccggcattttttttgccctgacaccgccataaacgacggagaacgccatgctccaccaacgcaatccagcctcgaccggtgatgcgctcgatctcgatgggcgcggtctgacgcagctcgacgaatcgcagctaaccggccacgcgctgcgcaaaatcagcctgtacgacaatctgctgacggccttccccgcctccatcttgcaacaccgcaacctgcaggtgctgaacatctcctgcaatcagctcgaccgcctgccgccggagattggtcagttgcaacagcttgagatgttcgacttcggtcacaaccgcgcaagcgaactgcctgaaacattggggcaactgcaccggctgaaatacctctacctgagcgataacggctttagcgacctgccgcgtgcgctggcgcaactgcagcagttggtttacctcaacgcgaccgataaccaactgaccgccttgccgcaggcaataccgagtctggcggcattgcaggagctgcgtttatacaacaatcgcatcggcaacctgcccggcgaaatcgggcagctgcgcgcgctgcgcgagttgcatatcatgaaaaatgccctgaccgcgctgccggcggaaatggctctgctcggcgagcttgagatactcgatgcggccaacaatgccatcaccgaactgccggcatccttctgccgcctgccgcgattgagcgagctgaacctgcgttttaatcagctgacgcgcctgccggaaaatatcggtgagctcacggcgctgagaagcctggatctgcgcgccaaccgcctgagcaatctgccggaaagcctcggtgaactgagccggctgcgcaagcttgatctgcgctggaatgatttcacccacacgcctaaaatcgtcgacatcctgcgggctcgcggctgtagggtgcacatctgaagagacgccggccgggttgtggccctgccggcgttagcggtagaaaggattaacgatacagatcgtcgcgcgagtaaggctcaatctccccttctttgcgcgtcttcaacagtttgaggatccaggtgtactgctccgggttcgggcccaccaggttttccacttcttcattcatacggcgggcaatgcgcggatcgtccgcttcggccagatcgtccatcggctcgcgaatatagatatccagcatgctggttttgccgtcgtacaccgggaacaacggcacgatcgccgcacggcataccttcatcaaccgcccgaccgccggcaaagtcgccttataggtggcaaagaagtcgacaaactcactgtgctcagcgccgtggtcctgatcgggcagataataaccccaatacccctggcgaaccgaactgataaacggtttgatgccgtcattgcgcgcgtgcatgcggccgccgaatttacgacgcacggcgttccacaggtagtcgatcagctgattgcgctggttgtggaacatcgccgccatcggttggccgcgcgcggccatcaacatcgccggcacatccaccgcccagccgtgaggcaccaggaaaatcacgttgcgcccttccgcccggatcttgtccaacacctcttcaccgtgccaacgcacgcgcttgagcactttctcgggcttggtgcaggccagctcagccatcagcaccatcgactgcggcgcgcaggcgaacatctggtcgataatgtgctcgcgttcgctttcaggcaactcaggcaagcaatacagcaggttgatgcgggcacgacggcgcgcgcccttcgccaacttgccagccagtttgccgaccgcacccagcaccggatcgcgcaggcgcgcaggcaccagcgaaatgccggccatcagaccggttcccaaccacacgccccagtagcgcggatataaaaaggctttttgaaactgcggaatgaactctacgttcgatttcttctcgttttgcatgcacatgctcttggcttagcgattcggctaatcataattgccagcaccgattttgcaattaacaaccgcgaaccgcccaggtaaaacagcatcggcccgcaatcaggccgatgaaattaacggcgccgaagcgccggaaaaagggggcgttaatccaactgcagctgaggaaccacttccttcacctgcgccagataatcgctgcggtctttgccgcccagcccttcggaacgcggcagtttggccgtcagcgggttcaccgcctgttggccggtccacagttcaaagtgcagatgcggcccggtggagcggccggtgttgccggagagcgcaatacgatcgccgcgtttcaccttttggcctggtttcaccagcagttttttcaggtgcatatagcgcgtggtgtactgacgaccgtggcggatcgccacatagttgcccgctgcgccgctgcgtttggcgatcaccacctcaccgtcaccgaccgccagcaccggcgtgccgaccggcatggcgaaatcgacgcccttgtgcggcgccacgcggccggtcaccgggttcacgcggcgcgggttaaagttggaggagatgcggaactgtttcatggtcgggaaacgcatgaagccgcgcgccaggccagagccctggcgatcgtagaatttgccgtcttcggcgcggatcgcatagtaatccttgccgccggtgcgcaaacgcacgcccaacagctggctttgcgatttcttgccgtcgaaatgctcacgcgacatcagcacggagaactgatcgcctttgcgcagcttgcggaaatcgagctgccactgcaacgccttgatcaccgagttgatttcgttacggctcagcccggcgtcgccggcgctgctgacgaagctgccgttgacccggccgctgatcacgttgttgcgccattcgccctgctgcgcctcttttgactccttgaagctgttgccgacgcgatcataggtgcgagtttcgcggcgggaaacctcccaggtcaactgctgcaaatcgcctgcgtcgttcacggtccacgacagttgctggccgatcttcaggttacgcagatcgcggttttgcgaagccagcaaggtgacatccgacatatcaatgccgtactgcgtcagaatgctgccaagggtgtcgccggtggaaaccacatattcatgcacgccatcatcgccggcatccttctggtccagctcatcctgcgggatttcgtcatcgggggtgggttggtcgacatctatcggttcactggcttcagggagcaatgaccgcatctggctggattctaactcgacgctcttggcgatggggttgtgttctggggggtaaacaaaaggccgccaaacagcgacggccaatgtgacgactgtcagcgaccccagcatgacgcggtggggccgtggcaggttgttatacgccagagcgatagttcggactatctgctgcactcgatattatcctcataagctttacttcaggcagctcacgtactggtttgacagctgagtcaggaatttcccgtagctgtccttctccagcgcgatgccggtgcccagcgggtccagcgttccggaacgcactttggtacccttggcgacggcattgattacggccggcctgaattgtggctcagcaaaaacgcataccgctttctgctcaaccaactgtgttcgaatttggtgtaggcgctgtgctccaggctgaatttcgggattgacggtgaaatggcccagcggactcaaaccgtagtgtttttcaaagtagccgtaagcatcatgaaaaacaaaataacccttaccttgcacaggcgtaagcatgttaccaacatttttgtcagtttgcgtcagcagattctcgaactggcgcaggtttgcgtctaatttgtccttattttgcggcataagttccaacaatctgtcgtgaatcgcgatcgcggtcacttttgctatctccggcgacagccaaacgtgcatattgtactcgccgtgatgatgcccatgatcgtcatcggcatggttatgcgcttcgcctgcatgttcatgatcgtcgtcctcttcgcctttcatcagcagcggcttcaccgccggcagttcgctgatagccagctttcgcgtcgccgagatcggcaccagcgccttggtcaggaacgcttccatgtccggcccgacccacaacaccaggtcagcggaacgcaggcgctggatatcggaagggcgcaacgcaaaatcgtgtggcgaagcgccgtccggcagcaacacctcggtcggcgtcacgccgtcggcgatggccgcagcgataaagcctaaggggcgaatcgaggtcaccaccgcagcggaagcgctgctcagcgggccggccatcaacagtgcgctagccagcagcgtgcgctgcagccatttatttttctttgccatcatcagtaatcccatcgttttcatcaacaaggcgtgatattataacatccgcttcgttctgcaacctgtaatctcgagatgtctacactgataacgctaaaaaatatctccgtcgccttcggcagccgcaaggtgctgtcgaacatttccctcagcctgcagcccggccgtattctcacgctgcttggcccgaacggcgcgggcaaatccacactggtacgcgtggtgctgggattggtcaaaccaaccgccggcacgctggagcgggagcccgacctgcgcatcggctacgtgccgcaaaaactccacctcgacgccaccctgccgctgaccgttagccgctttatgcgtctcaagcccggcgtaaagaaagccgacattctgccggcgctcaagcgcgtgcacgccgcccacctgctcgaccagccgatgcaaaagctctccggcggcgagaaccaacgcgtactgctggcgcgagcgctgctgaataaaccgcagctgctggtgctggacgaacccacgcaaggggtggacgtcaacggtcaactggcgctgtacgatttgatcgatcagctgcgtaaagagctggggtgcgccgtgctgatggtctcgcacgatctgcatctggtgatggcaaaaaccgacgaggtgttgtgcctcaatcagcacatctgctgctccggcgcgccggaggtggtctcgatgcatcccgaattcatcgccatgttcggcaaccgcggcgcagagcagttggcggtgtatcgccaccatcacaaccaccgccacgacctgcagggaaaaattgtcttgaagaaaaccgggagccgcgaagcatgatcgaattgttacttcccggctggctggccggggtgttgctggctagcgccgccgggccgctgggctcctttgtggtttggcgccgcatgtcctacttcggcgacaccctggcgcacgcctcgctgctcggcgtcgcctttggtctgctgctggacatcaatcctttctatgcggtgatcgccattacgttgctgctggccctggccctggtgtggctggaacgccgcccgcagctttcggtagataccctgctcggcattctggcccacagcgccctgtcgctgggtctggtggtggtggcgctgatgtccaacgtgcgggtcgatctgatggcctacctgttcggcgatctgctttcggtcacgctgagcgacatcgtgatgatcgccggcggcgtcgccgtggtgctgttggtgctgtggtggcaatggcgcgatctgctgtcgatgaccatcagcccggagctggcgcacgtcgacggcgtcaatttggcgcgggcgcgtaccgtgctgatgctggtcaccgcgttgaccatcggcctggcgatgaaattcgtcggcgcgctgatcatcacctcgctgctgatcattccggcggccaccgctcgccgtttcgcgcgcacgccggagcagatggcgggtgtcgcggtactgctcggcatggtggcggttaccggcggcctggccttctcggcattttacgatacgccggccggcccttcggtggtgctctgcgctgccgtgctgttcacgctgagcctgttcaaaaaacaacaggcttgattaaagcccggatatgacaagggccgcatctgcggcccttttttattggcggattaaaaatttactcttcgcgttcgagaccaaagtgccggtaggcgtgctgcgtcgccagacggccgcgcggcgtgcgctggataaagccctgctggatcagaaacggttcaatcacgtcttcaatggtttcgcgctcttcaccgatcgccgccgccagattatccaacccgaccgggccaccggtaaacttgtcgataatcgccagcagcagtttgcgatccatatagtcgaagccttcggcatcgacgttgagcatatcaagcgcctgcgccgccaccgaaccgctgatcacgccgttggcgcgcacttcagcgaaatcgcgcacccggcgcaacaggcggttggcgatacgcggcgtgccgcgcgcgcggcgagccacttcatgggcgccctcgtcggacagctccagccccaggcacccggcgctgcgcgagacgatgtgctgcagatccgccacctgataaaactccagccgctggacaatgccgaagcgatcgcgcagcggcgaggtcagcgaaccggcgcgggtggtggctcccaccaaggtaaacggcggcagatcgagcttaatcgaacgcgccgccggcccttcgccgatcatgatatccagctggtagtcttccatcgccggatacaatacttcttccaccaccggtgacaaacggtgaatttcgtcgatgaacaacacgtcgtgcggttcgaggttggtcagcatcgccgccaaatcgcccgccttctctaacaccgggccggaagtggtgcgcaaatttacgcccatttcgttggccacgatgttggccagggtggttttccccagccccggcgggccgaagatcaataaatggtcgagcgcgtcgccgcgctgcttggccgcctgaatgaagatctccatctgctcgcgcacgtgcggctggccgacgtattcagtcagcagcttgggacgaatggcgcgatcgaggatctcctcttcgttgatcggttcggcggaaatcaggcgatcggcttcaatcattatctaccccttttcggccttacagggcggcgcgcagcgcgtcgcggatcagggtttcgcagtcggcgcccggcttggcaatcttgctgaccatgcggctggcttcctgcggcttatagcccagcgccaccagcgccgagacagcttcggcttccgcgtccgcttccggcgttttgtcggcggcggccggcaggctgatctcgctgctgttgttgaacagatcgccgttcagccctttgaagcggtctttcatctcgaccaccaggcgctcggcggtttttttgcccacgcccggcagcttgaccagtgcggtgatctcttcgcgctccaccgcgctgacgaactgctgcgcggacatgcccgacaggatggcgagcgccagtttcggcccgacgccgttgaccttaatcagctcgcggaacagcgcgcgctcctgcttgtcgttgaaaccgtacagcagctgcgcatcttcacgcaccacgaagtgggtaaacacgatggcctcttgccccagttccggcagctcgtaaaagcaggtcatcggcatgtgcacttcataacccacgccgttcgcctccagtaacaccagcggcggctgcttttccagaatatttcctctgagacgacctatcatttaccctcctgcagaatgaccaggcatggcgccctgccatgccgttgctggtaaagcttataacataaaaaaggctggatgaatatccagcctgagcaatcatcgtttcgcgtcagcgcaaacgcccgcgcgccaggttcagccgcccttcgctcattcgcagcacgttctggctgaggtggcagtgggtgatggcgatggccagggcatccgcggcatccgcctgcgggtttgccgagagtttgagcagcgagcgcaccatgtgctgtacctgcgccttttcggccgcgccggtgccgaccacggtttgtttgacctgccgcgccgcatactcgaacacttccaggttctgattcaccgccgccacgatcgcgacgccgcgcgcctggccgagcttgagcgccgaatccgggttcttggccataaacacctgttcgatggcgaagaaatcgggctgaaactgggtgatgatctcgctgacgccggcgtaaatcagcttcagccgcgtcggcatgtcgtccaccaccgtgcggatgcagccgctggcgatatagctcaactggcgcccctgctggcggataaggccatagccggtgacgcgcgagccgggatcgataccgagtatgatcgccatatctacatccaccttgcatgcacggcgccgccgaacggcggcgcccgttttaccgaattacagcgtcgccgccacttcgtcggagatttcaccgttatggtaaacttcctgcacgtcgtcgcagtcttccagcatatcgatcaggcgcaacagcttaggcgcggtttccgcgtccatgtcggccttggtcgatgggatcatcgacacttccgccgcttcggcttcgaagcccgccgcggtcagcgcgtctttcaccgcgcccaggctttcccaggcggtgaacacgtcgatggcgccatcgtcataggtcacgatgtcttccgcaccggcttccaacgccgcttccattacgctgtcttcatccaggcccggtgcgtaggtgatcacgcccttcttggtgaacagataagccacggaaccgtcggtgccgaggttgccgccgcatttggtaaaggcgtggcgcacttccgccacggtgcggttgcggttgtcgctcaggcattcgatcatgacggcggtgccgccagggccgtagccttcatagatgatggtttccatattggtatcatcatcgccgcccacgccgcgcgcgattgcacgattcatggtgtcgcgcgtcatgttgttcgacagcgccttgtccatcgccgcgcgcagacgcgggttggaatccggatcgccgccgcccagcttggcggccgtgaccagctcacgaataatcttggtgaaaattttaccgcgcttggcgtcctgcgccgctttacggtgctttgtgttggcccacttactatgacctgccataaaaaatctccgaaaaaaactactggactgaattgatcacgaactcttcaatcgcctgctgattgctccacgacttggtcaacttcacggcctcggccgcctcaagccattggtaagcgtgatgctcggtaatcaccggatcgcgctcctcgggcaacgccagacagaaccagtgctctttattgcgcgtggttcccggcgcatagcgatgtcgcaaatggacaaagagttcaaactccacgcagcgctggcaatcgaacaacggcaggtgctctgcttcgatatcgatgcccacttcttccatgacctcacgccgcgcggcatgcggcggcgactcatcctgttccaggctgccggtgaccgactgccagaactcggtatcgtcgcgccgctgtaacatcagcacccgaccactggatttcgcgtaaatcactaccaggatagattcagggcgcttgtaactcatcactcgctctcttgttccgcaccggctttctttaccacgctgatcgccagctcctgcagcgccgccgggttggcgaagctcggtgcatcggtcatcagacaggccgccgcggtggttttcgggaaggcgataacgtcgcggatgttgtcggtgccggtcagcagcatcaccagacggtccaggccgaaagccaggccggcgtgcggcggcgtgccgtacttcagcgcgtccagcaggaagccgaacttctcgcgctgttcgtgttcgtcgatgcccagaatgctgaataccgtctgctgcatttcgctgcggtgaatacgcaccgaaccgccgcccacttcgtaaccgttgatcaccatgtcataggcgttggcgatagcgttgaccggcgcagcggccagctcttccgggctcatgtcgcgcggcgaggtgaacgggtggtgcatcgccgccaggccgccctcttcgtcttcttcgaacatcgggaagtcgaccacccacagcggcgcccagttgtcgagttgggtcagccccagatcgcgacccagcttcaggcgcagcgcgcccatcgcatcggtgacaatcttgaaactgtctgcgccgaagaacaggatgtcgccggtctgcgcatcggtgcgcgccaggacggcttccagcacttccgcgctgaggaatttggcgatcgggctctgcacgccttccatgccggcggcgcggtcgttgaccttcagccaggccaggcctttagcgccgtagatgttgacgaaagcgccgtactcgtcgatctgcttgcgggtcagctgtgcgccgcccggtacgcggatcgccgccacgcggcctttggcgtcattggccgggccggagaacactttgaactcgacgtccttgaccaggtcggccacgtccaccagctccagcgggttacgcaggtccggcttgtcggaaccaaagcgacgcatcgcttcggcgaaggtcatgaccgggaaatcgcccagatccacgcccttcacgtccagccacagttcgcgcgccagcttctccatcacttcacgcacctgctcggcggtcatgaaggaggtttcgacgtcgatttgagtaaattcaggctgacggtccgcacgcaggtcttcgtcacggaagcatttgacgatctgatagtaacgatcgaagccggacatcatcagcagctgtttaaacagctgcggagactgcggcagcgcgtagaatttgcccttgtgcacgcggctcggcaccagataatcgcgggcgccttccggcgtcgctttggtcagcatcggcgtttcgatgtcgaggaaaccgtggctgtccataaagcgacgtacgaagctggtgattttggcgcgggtcttcagacgctcggccatttccgggcgacgcagatcgaggtaacggtatttcaggcgcgcttcttcgctgttgacctggttggagtccagcggcagcggctcggagcggttgatgatctcgagcgcgtgggcgaacacttccacttcgccggtggccatatctttattgatctggctgtccggacgcgcacgcacggtgccgacgatctggatgcaaaattcattgcgcaggtcataggccttgtcgaacgccactttctcgtccgggtcgaagaacacctgcacgatgccttcacggtcgcgcatatcaataaagatcaggccgcccagatcgcgacgacgattgacccaaccacacagagtgacttcctggcccacgtgggacagattcaactgcccgcaatattcagtacgcatacgctatccttttacacagccgatgccgcgccgggctactgcgcccctgtcgcgcggctgttatctgataaattctacttgttgcccggtttaaaatccgtcgcataccagccggtgcccttaagctggaaaccggaagatgaaatcaacttggtcaacgcgggctgcccacacgccgggcagtctgccagcggcgcatcggaaaatttttgcaatttctctaaccgatggttgcaagcaccacatgcatattcataaatcggcataggtcgttggattaaagagtgttgaaaaaagggagtcattataaaggaaattcatccgcccgataagtgcgaacacagcattgttactgcactaaatggcgcgtttttgttcgaatcaacacatcggttaacaaatttcccattaacctgcgacagttttttcacgtagcctgattctcccccggttttgcgccgaacgcagctcgcccgacgcgccgaacagtttttatccacttcgcaacgagatgaaatccatgctgaaacttgacgcccaaaccaccgctctggtgctgatcgatttgcaaaacggcattctgccttacgccggcggcccgcacagcgccggccaggtggtggcgaacgccgccctgctggccgcccgttttcgcatgctgggcgcgccggtgctgttggtgcgcgtcggttggtcagactccttcgccgaagcgctgaaacaaccggtggataaaccggctcccgcgcccgccggcggtttgccggccagctggtgggaattccccgcgccgctggcggtctgcgacaacgatattctgatcaccaaacgccaatggggcgccttctacggcaccgatctggacttgcagctgcgccgccgcggcatcaagtccgtggtgctgggcggcatttccaccaatatcggcgtggagtccaccgcccgcgccgcctgggagcacggctatgaactggtgatcgccgaagacgtctgcagtgcgcagaacgcggaaatgcaccgtttcgcgttcgaacacatcttcccgcgtttggcgcgggtgcgcgacaccggcgaaattcttgccgcgctcgagcggtaacgttaagttgtagcctgataagccaagcacaagtaaaggaagacgacgccgtgatctacatcggactgccgcagtggcaacattcagcctggaatcgtatcgggctgcgtgatttggcggattacagccgctacttcaactgcgtggaaggcaacaccaccttctacgcgctgccgaaactggaaatcgtgcagcgctggcgcgacatgaccggcgacgattttcgcttctgcttcaaattcccgtcggacatcagccacaaggccgccctgcgcaactgcgccgccgagctacaggcgttttaccactgcctgagcccggtgcatcagcgcatcggccagttgtggctgcagctgcccgccgccttcggccccgatgagctgccgcgcatgtggcagttcttcgaaagcctgccgcaggagttcacctacggcgtagaagtgcgtcatccggcgtttttcgccaagggtgaggaagagcgcgcgttgaatcaggggctacaccagcgcggcatcaatcgggtgatcctcgacagccgcccggtgcatcacgccgcccccaataccgccgccgtgcgcgatgcccagcagaaaaaaccgaagctgccggtacacgctctggtcaccgccgaccaaccgttggtgcgctttatcggcggtgaccaactggccgataacctgcgctggttcgaagcctggcaacaaaaactgccgctgtggcagcaacagcatcagccctatctgtttattcatacgccggacaacggcgattcgccccagcaggcgcaaaaaatttggcaacagttgcgtctggcgatccctgatttgcctgcgccgccagactggccagaacaagatgcactgttttgacctattaatctgaccaataacatcaaatatttccccgcgacagtgaatacaatgacggctatgatgctggctgccagttttggttagggaacggagttaaaaatggtaagcgcgctttatgtggtgctcggcgcattgttgttgatcaaactctcttatgacgtagtcaggttaaggatgcagtaccgcgtagcctacggcgacggcggtttctacgaattgcagaccgccatacgcgtgcatggcaacgccgttgaatacattcctatcgctgccgtattgctggtgatcatggaaatgaacggcgcggaaatctggatgattcacctctgcggcctgatgctgatggccgggcggttggtgcattactacggtttacgcaaccgcgaggttcgttggcgccgttcaggcatggccgcgacctatatctctttgttgttgatggttctggcaaatatcttctatctgccttgggatctgattttcagcctgcactgatcccgttttatcatcaggcggccgcgccgcctgcttccgctccgcttttttgcgcttttctgttagactacgcagcttcgaattctgaactgatttgccgctatgccaaaccgcgatactcttttctccgcccccatcgccaaactgggcgactggaccttcgacgaacgcgtcgccgaagtgttccccgacatgatccaacgctccgttcccggctattccaacatcatctcgatgatcggcatgctggccgaacgttttgtgcaacccgacagccgggtgtatgacctgggctgctcactgggcgcggcgacgctgtcaatgcggcggaatatcaaggtgcccggctgccatatcgtcgccgtcgacaattcgccggcgatggtggaacgttgccgccgccatattgacgccttccgcgccgacacgccggttgaggttatcgaagccgacattcgcgacatcgacatcgaagacgcctcgatggtggtactgaactttacgctgcagttcctcgagccggccgatcgcctgcgcctgctggagaaaatctatcgtggcctgcgcccaggcggcgcgctggtgctgtcggagaagttcagctttgaagacgccgaagtcggcgagctgctgttcaacatgcaccacgatttcaaacgcgccaacggatacagcgagctggagatcagccaaaaacgcagcatgctggaaaacgtgatgctgaccgattcggtggaggcgcacaaggcgcgtctgcaacaggccggattcgagcatgctgaagtgtggttccagtgcttcaacttcggttcgctgatcgccctgaaagcgggggatgcgcaatgatcgaattcggtgatttctatcagcgcattgccaagagccccctcagccactggctggatacgctgcccgcgcagctgagcgcctggcaacgcgaatcgctgcacggcaaattcaagcagtggttcaactcggtggagcatttgccgacgctgacccccacccgtctcgatctgctgcacggcgtgcgcgctgagatggagcctggcctgtcgccgggccagcgtgaaggcgtcgagaaaatgctgcgcaccctgatgccgtggcgtaaagggccgttctcgctgtatggcatcgatatcgataccgaatggcattccgactggaagtgggatcgcgtgctgccgcacatctccccgttggccggacgcaccattctcgacgtcggctgcggcagcggttatcacctgtggcgcatgatcggcgccggcgcacactttgccgtaggcatcgatccgatgcagctgttcctgtgccagtttgaagcggtgcgcaaactgttgggcggcgatcagcgcgcccatctgctgccgctcggcatcgagcagttgccggaactggcggcgttcgacaccgtgttctcgatgggcgtcctgtatcatcgccgctcgccgctcgatcatctgtatcagttgaaaaatcagctggtagctgaaggcgaactggtgctggaaacgctggtggtggaaggcgatcgccaccaggtgctggtgccgggcgaccgttatgcgcagatgcgcaacgtgtatttcattccttccgccgaagcgctgaaatgctggctggagaaatgcggcttcgttgacgtgaaaatcgccgatatgtgcgtcaccagcctcgaagaacagcgccgtacagactggatgaccagcgagtcgctggctgaattcctcgacccgaacgaccgcagcaaaacggttgaaggctatcctgcgccgctgcgcgccgtgttgaccgccaaaaagccctagcgcttgctaattgggccggcctgcgccggcctcaacttacccgttgccggcatcgacaatccgcagctcatacaccatcgtcgcgttcggcgggatctgcggcgcatagcccgtttcaccgtacgccaacgccggcggcaccaccatcgtcagcgagccgtgatttttcagatggccgatcgcctcacggaacagcggcggataggcggagagcggctgtgacatcacctttccactgcgatccatatcctggatcacgctgccgtcggtcaagctctctttcaccacgatgtctacccgcgcgttttccgcaatggtttcatcccccatataatcgatgcgataccagaagccggaaggcgatttctgcgtgcccttcttctttttgaactcggcaacaaacgcttcgcctttgctggtttgcgccttcgccgcctggcttctggcgtcgttcaccgctttttccgactccgccaatgcgctggccagctgcgcatcgctcaactggtaatggccgttgaaggtatcaattacacccgccagcagcacagttttatcgggtgtgataccccaatttttacgctccgccagcatcgtttgaatgtcgcgccccagggcgacgccggcagcatagctctgttgttccggctttttcttcagcgttttcacctccggcaaccatttggcccgcgatctcagcccgctcaattcgtcttgcaaagcttgctgagcctgatgggcggcagccagctccgccgccgttttatccgcccgttgcgtcgcttcatccctcttctgcgctgcctgcgcgctttccgccgtcaccgccgccagacgttgttccagcgttttggcctgcacggtttgcgttttgtttttttcctgcagttgcgccaactgccgctgcagttcctccgtcgctttggcggcttctatcgcctgctttgccagcgccgccttcaggctgttctcttgctgctcggcctgctggcgttggccatcacgctctttttgcagcgctgccagttgctgctgaagttccctcgtcgctttggcggtctcggtcttttgctgctccagcgccatcttcaggtttttctcctgttgttcggcctgatgacgttgaacaccctgttctttctgcagctgtgccagctgccgctgcagttcccccgtcaacttgtcggcttcggcctgttgctgcgccagcgctgtcttcaggcttttctcttgttgcccctccagctgacgttggacaccctgttctttctgcagttgtgccagctgccgctgcagttcccctgtcaacttggcggcttcggccttctgtcgttccagctcagcggcggccgcttttttgtcctgttcataacgctgacgcgctttatcgttggcggtttgcgccgccgccagcttctcctcccaaacctgctgccgaacgttttccgccggtttaggcaaggccgccagccgttgttccagcaaggcaatgcgccgatctcgctccgcggtttgttgcttttgccgcgctaacgcggcttgcgcttcggcgatctgcgcctgagccttgcgctcctgcggcgtcagattcagcgcctgtcgcacgccgctggcgaagtcgctcaaggcgctcagatcgggagcaggtgccggtttatcggcagccgtcagggatgacgcaacgcgcagcgcggtcagctcctgctgcagtgattgaatagcggcttgctgttgttccaatcgagtctctttctcacgcagcgccttttgcaactgcgtcagttgctttctctgcgcagccgtttcacgaatctgaaccggccgggacgccggcttttgggtttcctgagatggggtaaccacggtatcagccgccggtgcgtcctgccgctgataacgctcggcaaactgcaataacgccggcacatcgtcatccgccgcggccaccgccggcgcaaacgccagcggtatcatcaggctcagtaatgcctttcttgcacgaggggtcattgggcgcgttctccgcgctcagccaggccggtcatcatggcagaactgatgtctgcgcagaggcggctggtgcgataacgatacagcgcgtcgacggtttcctgcgtgcccgtgttgacccgctggcgtaccccggcatactgcgcggcgccgctcatcaaggtatcgaactcgcgtttgaatttctgatatttctcgttatccatgccgcgcatggcatccagttcgcgctggcactgttgcatgcgctcggcctcacgctgccgcttatcttgctccgcaacttcttctgcactgggcggcttactcaatgtagaaacgggccgcttggcggtctggcagccggtcagggccaacgtcagtaaaagcgccgcggtccaacagtgtgccgttcgggtcattatcattatctccttgttaaatccgccgccaacgcgctctgcagtcgagctgacggctctcctcattgatgctgtgatgttccggccatcagccaagctgtgttcggacatgaaaatgcagacgcagcattgagaggcatggcgccaatcatttactgcatcaatacatatcaaaaaatcatttaatattatgatatttaaaggattttaactcacaaacttatcagcaggacatgacgatcgcaagaagagatggggggttggtcgaccgagataccacgttgaaacgggcgaatggtctttacaaaacataaaaaaagccccggcaaaacgccggggcctgactttacgctgtatcagcgtcctacaaaccttatcgactgtttcaatcgtcccatctgattgacaatcatgttgccaaccaacaggagaaattccatgagcaatatgattagtgtaaataatatcagtgaattgcgtaatctgacgccagttacagatgaccagattgtctttttagtttctcacgccgccggacgtttcgccggcggcggagaattctattatgcgaaaacggatacaaccagtgcggataataacggcaccgtggtggttacatcgggaggagcccgctggaaacgactggagcagaaacttagtttcgatcacttcggcgccgatcccagtggtacctccgcctcggatgcagcaatcagcgcgacattaaactatgccgcgagtttaaaaaacaaagtggtctatgcttcggaaaatgctcaatatctgctgaccagtgctcaacctatcaacgtcgctagcggcgtcactgtgagaggctcccgtcgcggtattgctcaaggccctgcaagcctcacaagcaatggccctaatcgggcaggccttgcggacgacagtgctttcattatcaaaaaacccgcgggtacggtttgtttcgcctgcgataagaatgttgtctttgatggttggtcgttcctctacccggatcaaaaatatactgccacccagccggagacattcgttcaatacggtgccaccattaccgcaggtggcgctctgtcagtcgccaactgccgttatgtaggcgcctatgactttgttgaagctcgaggagaagccaacaactttgagaatatctacggttgggcagtccgctgtgactacagggtttatgaaagcagggacatcaacagatttaccaatgttcacgtcaatgccaatgtcgtgcgtccgacagaaaacgcggttactgcctctatcgccgtagccggttcttgtgctttcaatttcgatcgccacgacaatacgtttatggtgaatgtattctcttatggcaaaaagatctttatcaaaaccacaacacaaggaacttcctatttaggcggtctcagcctaagcaatttcatggcagacagaaatggtaccggcatcgatatcgactcagattcctccgccaatattcaaatcgccaacggttcctacatcaatgattatggtgatgccgttgggggattcctggtattaagaaaatccaccagccaatctaatatcaccccagttcaaatcagtaatgttaacttcgctaccgccaatgggcccaagggcacactgtcgccccaggctattcgcttcgaagctaacgctgggtatcaactctcattcagcaacaccgttatgccaatgtggacaaacggcagtctgaacaatgaagctggttacaacattctcagaggcacactgggcattgcacagcgcagttatcagctgcatgaggccccgctaaattatttgacgaacagcaatctgatcgccatcggtgctgacaatcagcctacaggctggtttatcgacgggaaactgacggtagacagcaatcttctgacagccactggcgacaacccggcctacaaaggtttgggtcaacgtattcatcggagcatgggaccgaggacattctgggccatcgcatcctctatcggcgatcaatctaccgcgcaagcttcgactggcatttgggcccgctcgttcaacgataactataccgacactgtcgagagcaatcaggctattccctggatacgcatcggcaacctttactacgcgcgttttgtcatgaacaacaatcgcactatccacgatatcttggtcaatcccggcagtggcaataatacggtgcgcattttagcctgcggcattagcccgggtgaaatcttcgacttctcgcctgacacgttgcaatagtctctcgcggcataaaaaaagccccggcaaaacgccggggcctggtacttgcgtgatcgccgagggcttcagtgacacgcaaaggggtcttacggcccggaaaccggttgtcaaacgcggctaactgcgtgcttatgcgctttgcgccagaggatcaaccaaggccagcgcgtttttcatcgcctccaccatttcgccatccacgcaataatggctaaattcgtcaaactcgttatcggagcacatggtgacgcccgccttgcgataacgcatggtcgacggcaccagatggccggaagagctgtgcagttcatgcaggccgatatcgacaaacttgtgcagattgctgaggcgcacgccggcacccgccatgatcaccggaccctggctggcctggcgcaaatcgcgcagcaacggcaggccaagttcggcgctctgctgctggccggaggtcagaatgcgcgccacacccagttcggtcagttgctccagcgccaccatcgggttctggcacatgtcgaacgcgcgatggaaggtcaccgccatgccctcgcacagcctcatcacttcgcgcatgcgcggcagatcgatgtgcccttcgtcgtccagcatgccaaccaccacgccggggaaccccatctcgcgaatttggcggatatcttgtttgatcacttcgaaatccaccgcgccgtagcagaaatcgccaccgcgcgggcgaacgatcggatgcaccgggatcgcaacccgctcacgcgccagacgcagcgtgccatagctcggcgtcaatcccccttcgctctggctggcgcacaactcgatgcgatcggcgcccgcccgttcggccgtcagcgcacagtcgacgctaaagcaacaaacttccagttttatcattgtcacccccagataacggccaacatacggcggcaattgttcatttcttcatttctcacgtaggctcatgcataggcataaaccggctcagggttatcactatggcattcaattttgatcaatgggtagaccgcagtcacagtgacagcgttaagtgggataaatatcgcggcagcgacatcatcccgctttgggtcgccgacagcgatttcacctcaccgccggcggtgatcgaagccttgcagcgccgcgtagcacacggcgtattcggctacacccacccatcccctgatcttattgaggtttttacccgccgcatggtagagcgctatgattggcacatcaagcctgaatggatcattttcctgcctggcctggtgtgtggcctgaacctgtgcgtgcgggcctgcaccgaacaacatcagagcacgctggccccctcgctcatttatccgccgtttcgcaaagcggccaaattcgccgggcgtaaacaccttccggtatcgctaacagcggtcaaccagcgttggggactggatttttcctcgatgcatgatcagctcaacggcaacgaaaaactcctgttgctgtgcaacccgcagaaccccggtggcaccgtgtatcgccgagaggagttgttgcagcaccatcagttcgctcgcgaacacgatttaatcgtctgttcggatgaaatccactgcgaactgctgcttgagcccggcgcgcggcatatccccttcgccaccctgaatgaagacgcggcccaacgcagcgtgacgctgatgtcaccgtcaaagacgtttaatctcgccgggctcggcgcctcaatggcgatcgttcccaacgaagcattgcgacaaaagctgaaacgcgcgcgcagcggcatcgtgccggaggtcaatctgttggcgctggtggcggcgcaggcggcttatcaatacggacaaccctggctggatgagcagttgatttatctgcgcgccaatcgcgatcggctgacaaaacgtatcaacgccatgccgggattgacgttgctgcccgtcgaggccacctatctggcctggatagactgcagcgcactgccggtagataacccgcatcagttcttcgaacgtgcgggcgttgggttaagcgccggcctggacttcggcgatcggcgctttgtacggcttaactttggttgccgatgggctctgctcgatgaagcgctcgatcgcatggcgcgcgcctgtgcggcgctgcctggctaaccttgttcgctggcgacgatgtctcgaatggaatacggatgaaacttgatcgtaaccgttccgtcggtgatggccagcgtcgggttcggtagccgctcgccctcgccttttggcgagctttgcttcagcttgatccccggcgccaacaatgcctcatcggcaaggtggctcaacgcccgagcgtacagcgtctgaggatcgccactgagcactaattcgacgtgttcccagccttcgtgcggatagcgtttctccccaggatacggcagctcgatgcagtctatccgccacggccctacggccagcggctgagacaaatcgaacagacagataggccgcccgttgatcatcgattcggatagcagtgtcccgcactgcatcagcccctggcgccaacgttcggcggtggcattctggtgacagcgcaaagagatgtgatcggcggtgaacgcggccagatcaagccgcaatttggcggcaaattgatgcagcgcctgctcgaaacgcggcaaatcgagcttcagatcgtcaagctcggcaatggcctgcaagggagtggtcatagaaacctcaaaacaacggagcgcaaagttaaacgcggtaatttacacggtggcggcagtgctcgccaccgttacgacgtttttcggcgtcagttcagaatgatttttggttgcggacggggagaatgaaaaaccagtcccttattaagatgactgcttattaaaacaacagaaaaataaaaaataagatttttcgcaagccattataccttttcttcatgacgctatgatttaagttattttgcacaaaactctctgcagcccattggtcaactcgattgaatagtctggtttaatcaaacctgatccacttatcgaaaccacataaaaccataagcataacctattgtaaaagaaggcaataaaccccattaattgatgggaagctaaggattatcttaattttcccccaggcaattgattcaccaagacaactcagctactttggaggaaatttaaattcgagatgatcattatgttattgctgacgatatccttggtgttgataattatcgccgtatacgccatctaccgtcatttcaaatcacgcagcgccaacacgctggatgccggtcgccgcaataaaaagcgctagcttcgcaactctccccttcgtacattctgttcagatcattctgctttcaccttccggcaatcaacgcgccgccctcgacaactgtttcatcgcagcggccgcgccaactgctgacgggctccgtcagatcggttacaattacaggctgttttgtggcggtcgcccatcgcgcccgccaccgttgaatcccgcaggggctggcttcagcccctcgttcgtcattaaggtaacccggtgaatattcaggttcttctttcagataaagtcagccaggcgctgatcgccgctggcgcgccagccgattgcgaagcgcaggtccgcccttccgccaaggcgcagtttggtgattaccaggccaacggcgtgatgtcagtcgccaaaaagctgggcatgccgccccgtcagctggcggaaaaagtggtgcaactgctggatctcggcgacgtcgccggtaaagtggaaatcgccggtcccggctttatcaacattttcctgaacagcgattgggtcgcccgccaggccgatcaggtgctgaacgcaccgaagctgggcattgcgccggttgagccccaaaccatcgttatcgactactccgcaccgaacgtggcgaaagagatgcacgtcggccacctgcgctccaccatcatcggcgacgccgcggcgcgtacccaggagtttttgggccataaagtgattcgcgccaaccacgtcggtgactggggcactcagttcggcatgttgattgcctacctggaaaaaatgcagaacgaaaacgccagcgacatgggcctgtccgatttggaacagttctatcgcgaagccaagaaacactacgacgaagacgccgagttcgccgagcgcgcgcgcgcttacgtcgtgaagctgcagggcggcgatcagtactgcctgaaaatgtggcgcaagctggtcgacatcaccatggcgcaaaaccagctgacctataaccgactgaacgtcacgctgaccgaagacgacgtgatgggcgaaagcctgtataacgcgatgctgccgggcatcgtcgccgatctgaaagccaaagggctggcggtggaaagcgaaggcgccaccgtggtgttcctcgacgaataccagaacaaggacggcgacccgatgggcgtcatcatccagaaaaaggatggcggctacctctacaccaccaccgatatcgcctgcgccaagtatcgctacgaaactctgggcgccaaccgcgttctgtattacatcgactcccgccagcatcagcacctgatgcaggcctggaccatcgtgcgcaaagccggttacgtgccggagtccgtctcgctggaacaccacatgttcggcatgatgctgggcaaagacggcaagccgttcaaaacccgctcgggcggcacggtgaagctctccgatctgctggatgaagccatcgaacgcgccgaacagctgatcgccggcaaaaacccggatatgccgcaagacgaaatgaagaccgtggcccgcgtggtcggcatcggcgcggtgaaatacgccgatctgtcgaaaagccgcaccaccgactatgtcttcgactgggacaacatgctggccttcgagggcaataccgcgccttatatgcaatacgcctatacccgtgtggcatcggtattcaagcgcgccgggatcgacgaaagcagcctgacactgccgctgacgctgaccgaagagcgtgagattgcgctggctacccgcctgctgcagttcgaagaggtgctcaccaccgtcgcacgtgaaggcacgcctcacgtcatgtgcagctacctgtatgatctggccggcttgttctccggcttctacgagcactgccagatcctgaacgccgacagcgaagaaacccgtcagagccgcctgaagctggcgctgctgaccgctaaaacgctgaaaaccggcctggatacgctgggcatcgaaaccgtcgaacgtatgtaaaccgcaccgcgcggaaagtaaaaaggtcgccaaggcgacctttttttgttcttgcattcggctcaggcgacgcggcgcgcaaaatcacgcgggcggaagcccaacccggccagcacgccaaagtaggccaccacaccggccaccaccaccgccgccaaacgcagcaaacgttccagcatattgccctgatcccaggccggcatcagccacatcacgccaatcagcaccgccgacatcgccagcacggcgatcaccagcttagtgaggaacagcgcccaacccggctgtggctggaagatcttctgcttgcgcagctgccaatacagcagcgaggcgttcaggcaagccgccaagccgatcgacagcgccaggccggcatgcttcagcggaccaataaacgccaggttcatcacctgcgtcatgatcagcgtgatgatagcgatcttgaccggcgttttgatgtcctgccgcgaatagaagcccggcgccagcactttaaccacaatcagccccatcagccctaccgagtaagccaccagcgcgcgttgcgtcatcgccgcgtcaaaggcgctgaacttgccgtactggaacagcgagacggtcaacggtttggccaaaatgcccagcgcgatggcgctcggcagcgccagcaggaaacacaggcgcagcccccaatccatcaggcgcgaatactcatcgtggttgccgctcgagaagcttttggccagcgacggcagcaggatggtacccaatgccacgcccaacacgccggaaggaaattccatcaggcggtcggcgtagtacatccaggacaccgagccggataccaggaacgatgcgaagatagtattgatgatcagcgagatttggctgaccgacaccccaaggatcgccggccccatctgacgcattacccgccagactccggcatcgcccaatttgatgcgcggcagcaccagcatgccgatcttgcgcaggtgcggcagctggtagcccaattgcagtacgccgcccactaccaccgcccacgccagcgccagcaccggcgggtggaaatacggcgcggcgaacagcgcgaagccaatcatgctgacgttaagcagcgttggcgcaaaggccgggatcgagaagcggttccaggtattgaggatcgctcccaccagcgacgccagcgagatcaacagaatataggggaatgtgatgcgcagcagcgccgacgtcagggcaaacttgtcgggcgtatcggtaaagcccggcgcggtgagatagataacccagggcgcggccaacatccccagcaccgtcaccaccgccagcaccagcgtcagcagcccggagacataggcgataaaagtgcgtgtcgcctcgtcgccctgctggcttttgtattcggccaggatcggtacgaaggcctgcgaaaatgccccttcggcaaagatacggcgtaacagattcgggagtttgaacgccacgaagaaggcgtccgttgccatgccggccccgaacacccgcgcgacgatcgcatcgcgggcaaagcccagcacccgcgaaaacatcgtcatcgagctgacggcagccaaggatttgagtaggttcatgtggttgtctgataggtaccgtaaatatcaacgcctgcaacagcaggcgtcagtgaaacaatcggctcagtttacgcatccggaaaagaatagctaccgccagatgttacatagagttatcccgcagcaaacgctcgaccacccgctgggcaagcagcgcctgttcgccgccggtttccggcgcgctctgattggcgacggcatcaaggaaatgccgcaccgcaccgtcgaagccgcgttgcaccagcgtgctttgccagcccggcaccggttgttccaactcgccctgcgcatcttcacgcagccagtggcgcatatcggtcaactgatacagcgcgccgtctgtcaccgcctgcacgctttcgcgctggctgccgccgcggcgatgcatgctggtcgtcacctgcgtatcgccgcaggcgaagtgatgctcggcgtacagcatttcgcctgcggcgttggtgcgcacgctgccgctcagcagttgctcgccgccgcccgccagccacagcgccgtgtccaccacgtgcaggtaatcatccaacagggtaaaacgcagatcgtgcgggccgacgctgtccgcccgatgtttatccatgcgaatggaggccggctggttcatttgctgcttgagctgccggtaaagcggcgcgaaacgccggttgaaccccaccatcaacgttttgcctcgccgctcggccagctcaagcaactgctcgccctgctccagcgtctccgccagcggtttatcgacgtaaacgtgcacgccgcggttcagcagctcgcctattactgaaaaatggctggcggtgctgctgtgaacaaagaccgcgtcgcactgttcggccaggctgtccagccgggagaaacaggccatgcggtagctgtcgcacagcggctccgctttttgctgattgggcgaaaaaccgcccaccagcgtccagtccgtcgcctggccgaggattggcagataagccttctgcgcgatactgcccaatcccaccacgcctacacgcaatttagtcattcgcatccttcaccaacagatgttgcaactgccgtttcagttccgccacttcgctttctaatgcgctaaccctggcgctcagttcgccgtcgaactcggattcgaacgccgccgccggcgcttcatcaatctggccgctgaacagatgcatgaatcggctttcgcgcttgcccggctcacgcgccaggcgcaccacgaacggaccatcttcccgagtggccagctgttgcagcacctgttcaacctcgctgacatcgctgaactcgtgcatccgattggtacgggtgcgcagctcgccgggcgtttgcgcgccgcgcagcagtaaggtggcgatcaccgccagttcggcgggcgaaagtttcagttggccgaactcggagttgcaaaaccgctgttcgtacttcactacccggttgccgaatccgctgagggtgcgcaagaaatgtttgcgcagcaacagatcgagcagctgctgcacttcgctttcgctcagatccatcaccggttcacggttggttttttggttacatgccagcgtaatggcattcagcgaaagcgggtattgatccggggtcgtgacctgtttttccaacaggcagccgataacccgagcctctttggcgttcaattcatatttcatcgtttggcctcaacgtgggggtagccactctttattggtgtatgccgtcaaaacgtggtcttgccactggccgtcgatcagcaggtaatccttggcgtaaccttcgcgttcgaatcccagacgcgtcagcaatgcgccgctgcgctggttgtgcggcatatagttggccatgatgcggtgcatgcgctgttggcgcagcatatagcggatggcggactgcaaggcttcgaacatcagcccctgcccctgccatttctcccccagcgaataaccgaggaaacaggcgtgaaacgaaccgcgcagcacgttgctgaagttcgccacgccgcggacttcctgctcttctggatcgagcaggataaaatagtaggcgctgccctgcttttgcatttcagcgatcatccccagacgcgcctgccagccggaaggataacaatggctttcgtcgcgcaccggctcccagggtttgagaaaagctcggttctcggcataataatccgccagacgataggcatcccgttcatgcactaaacggaccaccatccggtcggtagtaagacgtacttttggcgatgcagagcggtagccgaacatcatttcccccgcagtcaaaacggttcgataagaagtatttattgggaagccgcgtggataatcatccgatgccgatctgatggcatgattttattttgccaatagcgcttcagaaccgcacttccctgcattcaatataaccgtagcccgcccccgaggtaaaacctcggtcgctcagtaaatcgccgaatacgcgttttacggcgtttttccgcccattttgcagcacaggtaacaccttgacgataaaaaaatattatctactccgcccctgtcgccgtccggcaattgggtagagaatggtggagttgccttccccctctctcttaattgctcatggtgatgcatgtctctggtgtcgcaagcgcgcagcttgggtaaatattttctgttgctcgacaacctgctggtggttttaggcttctttgtcgtgttcccgcttatttcgatccgcttcgtcgatcaattgggatgggcggcgctgatcgtcggcatcgcgctgggtttacgtcaactgctgcaacaagggctcggcatctttggcggcgccatcgccgatcgcttcggcgccaagccgatgatcgtcacgggcatggtgctgcgcgccgccggtttcgccaccatggcgatggccgatgccccctggatcctgtggttctcttgcgcactgtccgccctcggcggcacgctgttcgatccgccgcgcaccgctttggtgatcaagctgacccgcccgcacgaacgcggccgttttttctcgctgctgatgatgcaggacagcgccggcgcggtcgtcggcgcgctgatcggcagttggctgctgcagtacgacttccactttgtctgctgggtcggggcggcgatcttcgtgctggccgccggctggaacgcctggctactgccggcttaccgcatctcaaccgtgcgcgtgccgatgaaagaaggcatgctgcgggtcgtgcgcgatcgccgcttcctcacctatgtcctgacgctgaccggctactatatgctggcggtacaggtgatgctgatgctgccgatcgtggtcaatgaaatcgccggctcaccggcggcggtgaaatggatgtatgcgattgaagcggcgctgtcgttgtcgctgctctatccgctggcgcgttggggagaaaaacacttccggcttgagcagcgcctgatggcgggcctgctgctgatgacgctcagcctgctgccgatcggccttgccagcagcctgcaaggcgtgttcacgctgatctgctgtttctacctgggttcgatcatcgccgaaccggcgcgcgaaacgctgagcgcttcgctggccgatccacgtgcgcgtggcagctatatgggctttagccgccttggtctagcgctgggtggcgcgttaggttacaccggcggcggctggatgtacgataccggacgcacgatgaacatgccggagctaccctggttgctgcttggggcagtgggcttcgctacgttgctggcgctgtactggcagttcagcccgcggcgcagtgcatcgatgatgctgcgcggcggttaacgccatagaaatccggccgaatcggcaacagctgctatcctgttagtaaaaacccccacaggagcccgtcggcatgagtgaagaagcaaaattaccgcaactactcgaacatatgatactgaacttgcgcatgatttatgcgcgttccaccctggtggaaaaggccctggcccatatcctcgccagcgacgccggcctgaaaaacgatattatcaaacagctgcaggtcgtcaccgccgccaacgaacgtgacaaaatcgacctggaagaagctcgcattcacctgatcgatgtgctcaactcggtaccggccaagaaataacgccccctagcccgcgccggtgcgcgggcaatatcgcaataacgcaccatccaacacacgcacgtcaagacagcctcgataagctgtggtaactattgctgttaaaacctgacaacccggagcaagcatgaaactgttcatttacgatcattgcccattctgcgttaaagcccgcatgatttttggcctgaaacgtctgccgattcgtctggtcacgttgctcaacgacgatgagacgactccgttcaatctgatcggccaaaaaatggtgcctatcctggtcaaagacaacggcgaagcgatgccggaaagcctggatatcgtgcgctatgtcgataacctggacggcaagccggtgctgaccggccgcaccaacccggccattgccgagtggctgcagcgggtcggcgggtacagcgcaaaattgctgttgccgcgtattgcgcatgccgatttcgaagagttcgccaccgacagcgcccgccgttattttatcgataaaaagcaggggtcaatcggtgatttcgccgagcatctcgccaacagcgccgatctgatcgcccagttggaggccgatctgcaaaccctgtcaccgctgatcgtctccgccgaagcggtaaacggcgaactgtccgaggacgatatccacctgttcccgctgctgcgctcgttgtcgatcgtcgccggggttgcgctgccggagaacgtggaaacctaccgcaaccgcatggcgcagcgctgcgaggtgccgttgctgctggacatggaacaataacgtttgaataacccaaaggatagggcgtactgatgctgaaaatggtgctcgccaccgctcgcgatcgggcgcggctgaaggaaattacctccgttctgattcgttacggcctgcaagacgttctgcgtctgctgggcctgggggctttgctgcgcggcgcccgcgcaggatccgtccaacaggacgcacaaaccctgcccgagcggctgcgcgaagcgctcgaggcgctgggcccgaccttcgtcaaattcggccagatcctggccacgcgttctgatcttctggatccggcctggaccgacgaactggatcgcctgcacagccaggcagcggtgttgccatgggaaacgctggcgccgcaaatcatcgccgatctggggggcgagcccgagcagcagtttgccgaattcgatcgcacgccgctggccgcagcatcgatggcgcaaatttaccgcgcccgcttgcacagcggcgaacaggtggtggtgaaagtgctgcggcccggtttggcgaaaaccatccacgccgatctgcggctgctggcctcgctggcggaaaccgtggagcagcagagccccgcgttggcgcgctatcggccgcggcagatggtcagagcgctggcgacggcgctgaatcatgagctggatttgactcacgaagggcataactgcgatcgcgtcgccgggatgttcgcgcatgaacccgatgtggtcgtgccgaaaatctattggcaatggtcttccccgcgcctgttagtgcaggagtacttgcccggcaccgcgccggagaaccctcagcaattggcggcggcgggctttgacggcccgctgctggcgcaacgcggcgcgcgcgcctttatgagcatggtgctggagcatcggttgtatcacgccgatcctcaccccggcaacgtcatggcgctgagcggggaccgcgttggctttatcgacttcggcatggtgggccaactgtctgagcggcggcgcaatcagttgcttctgctgctgcaggccattgccgatcgtcagtccgaaggcatcgtcaacacgctgatcgcctggtcggacagcgaaccgctggatctgatggatctggagctggcggcgcaaaactttctcgacaaacaggccgccgccaccctgacgttgggcaaggctctgaccgacctgctggtgatggcgcgtgaacaccagttggcgctgccgcccgatctggtgctgctgttcaaggcgttaatcaccgccgacggcgtgttgcaccgattggatccggccttcgacatcgtcgccacgctcaaaccgatgctgcaacaaacggtgctgcaacgctatgcccctgacgccgtgcgccagcggttgctggccctgggcggggaagcgctcgacgccggggaagaactgccgcaaaccctgcggctgttggtgcgccgcctaaaacgcgggcagctcaatgccgatatcaacgtcagtaatctcggccagttgagcaaagcgctggaacgcgccgccgtcaccctggctatcgccattgtcaccgccgctttcgccctgggcctggcgccttatctgatgcactcctcactgcagctgtggggcattccgctgttcccgctgttgggggccgcggcctgcctggccggcgtgatcctcctggcgctgcgattgcggcgctgacgctttcggcgttatccgataggtgtcgcccgtttttgcgcgcactatcctctgcacatcgccgcctgccgttttcaggcgcaggcggaacgtttataatgattaatcaattatctgcagcacttttcgccagcagtcgcaatgaggcattaatgaagaagatcctgatgggcgcagccgccctgctgttcgccggcgtattggccggttgcaatcaactgacccagtacaccctgagcgagcaggaagtgaatgattacctgcagaaacataacgactatcagaagcagatcggcgtgcccggcctggtggacgccaacatcgtgctgacgcagctgcaaagccagatcggccgcagcgagccgggtaaagtcaccctttccggcgacgccaaggtcaacatcacgtcgattctcggcccgcaggcggcggatctgaagctgacgctgaaagcgcagccggtttacgaccgcgcacagggcgccatttacctgaaagacatggaactgaccgattacagcgtgcagccggaaaaaatgcagacggtgatgaaagcactgacgccatatctgaaccagtcactgaagtcttacttcgaccaaaagccggcttatgtgctgaatcctgacaacagcaaaaccgaagcgctggcgaaaaaactggcgaagggattggaagtgaaaccgggtgagttggtgataccgttcagcgactgacgccgtctggggacatcaagcccgccgccaggcgggctttttattgccaaaaaagcgttactgcggcgcgctgtaggcgatctcgccggtgttgcagttgagcgtcacgttgtaggttttatctgccttggtgccacgcaccgtcaacggcacctgccacacctgatccttgccggtgatggcatccgggctaacccaggcgatcggggtggcggtgcccagcagctttttgtccgattcccagcgcgtgatgcggttctgcaagaagtcgcgcttgacctgggcggcgatatccgccggctgcagaccggcacactgccccaccttggcggcgcgctgctcgtgatcctgcgcccacaccgcagtcgatgctcccatcatggccaacaaggcgatagccaaacccgtttttttcatatctcctcccgttgtgattagcgctatccgggccccatccctggctcacaacagggtttcggcaaagggtttaccgtttgacgaactcgatgacaaacagcgcatccaggcccggatagatttccttgatcacctgcttcaattcgccgagcgacatgttctcctgctgtgcgtggcgttcagtcagcgcgtccaggcgcaccggcgttaccgacagcacttcgataaagcagaaaaatacgccgtcttcattgcggcttacgcgcaatacctcgcccggttcgaagtgcgactcactggcatcccgaatggtgatggttttgcgcccggccagaatatcttgctcaaagcggctgaagaaagttatttcacggctcattttagatcctttttcatcacaacaccgcaacataagtcattatgccgcttgcttttctgacgcagatccctcttttgagttagaggccgcttttttcgctttcgcttccgccggtttcttgagggtttccgccggtgaagcgccgcgcagaatcagacccagcgcatctttattctctgccaggaagaagctcagcccttcgcgctgttcgtcgtccaggttcagcggcgcctgttgcagccactctccgaggttatccgccagatccagcattttgtcgtaggcgtcggcttctttcttgctcgcgaaagtcattttttcctcaccgtttctcaccaccacatatttaacttcaaccgccatgcgtgcgtcctcaaatactcaaacaactgtaattacatacagtataaatagataatggcgggagggcaaaccgccgcccgccttcggcttatttcagcagccgcaccttgcagctcttgcctttgattttgccctgttgcagctgttgcaacgccttgcgcgcgctggctttacggatcgcgacgtaggcatgcaccgggaacatgtcgattttgcccacttccgccgccgtcagcccggcattgccggtcagcgcgccaaggatatcaccgggacggatcttcgccttgcggccgccgtcgatgcacagcgtcaccatctctgcctccagcgagccgttggccgccccgctcagctcggacaccggcgcccaatcgacggtcatctgcaggtagtcttctatcgcatgcgcccgcgccatctcctgcggcgtgcacaggctgatcgccagcccgctcatgccggcgcggccggtgcggccgatacggtgcacatgcacttcgggatcgaacgccagttcgtagttaaccaccagctccagctctttgatgtccagcccgcgagcggcgacgtcggtcgccaccaacactcggcaactgcgattggcgaagcgcaccaacacctgatcgcggtcgcgctgctccagatcgccatgcagcgccagcgcgctgatgccgcgggcctccagggcctcaagcactgtctgacaatcgcgcttggtattgcaaaacaccacgcaggacgcgggttgatggtagcgaatggccgacaccaggagcgccggacgctgctcgcgcgtagtctcataaaagcgttgttcgatagcggtctgcgcttcgtcatcgtccacttcgacgctcagcggctgacgctgaacacgctcgctgatgcgttcgatgcccgccggataagtggcggaaaacaacagcgtctgacgctgcggcggcgtgtagctgatcacatcgtcgatatcgtcggcgaaacccatatccaacatgcggtcggcctcatccagcaccaacaccttcagctcgtccagcagcagcgttttcttgcgcagatgctcctgaatgcgccccggcgtccccaccacgatgtgtggcgcgtgcaccagcgagtcgagctgcggccccatcggttggccaccgcacagcgtcagaattttgatgttttgcgtgaaacgcgccaggcgacgcagctctttgcttacctgatcggccaactcgcgggtgggacagagcaccagcgcctgcgtggcaacctgagtaacgacgatgttattcagcaagccaatgccgaaggccgccgttttgccgctgccggttttcgccttggcgcgcacgtctcgcccttgcaggatagcgggcaacgcggcggcctgcaccggcgtcattttggcgtaccccagttcgttgaggttggccaactgttcggctggcagaggcagggaagaaaaagaaactgtgctcacggcgataactcttatatgacgaatggaatggcggcgcgcccgcaggttggcgccgaatcagcggtaaatgataacagagatgggcggcgttacgggcagcgggcataaaaaaacccgccggcggcgggtttcttggcagctcagtcgttaaatcgcaacgacgttggctgcagctgggccacgttggctgtcctggatggagaattcaacctgctggccttcagccagggtcttgaaaccatcgctaacgatagcggaaaaatgaacgaaaacgtctttagagccgtcggcaggcgtgatgaagccgaaacctttgctttcgttgaaccatttaacgtgaccagtgatcttgctcatttgtgtttcctttacttgataaacctgccttgacggcacgagacgcgaaaaccttgctatatataggccttctttcgccgtcgcttattaacgcacaatcgcccaggcagggcaaatatttctgcttgttataaaaacagtaagttagcaacaaacctggcgcggtggctgtgaacgcaatcgttttcgtatatactgcccgccgatcatcaatccgcttactttcaccgatccaggtacgaaactatgttaacgattggaaccgccctgcgcccttccgccacccgcgttatgttgctcggctccggggagctgggtaaagaagtcgccattgaatgccagcgcctcggtctggaagtgatcgccgtcgatcgctatgccgacgcccccgccatgcatgtggcgcaccgcagtcacgtcatcaatatgctggacggcgacgcgttgaaagccgttatcgaacaagagcggccggactatatcgttcccgaaatcgaagcgatcgccaccgccatgctggtggaacttgaacgtcagggccaccgcgtggtgccctgcgccgaagccacgcgcctgaccatgaaccgcgaaggcatccgccgtctggcggcggaagaacttggcctgcccacctccagctatcgctttgccgacagcgaagcggctttccggcaggcggtcgagcacatcggctacccgtgcatcgtcaaaccggtgatgagttcttccggcaaagggcaaagcctgatccgcgcgcctgagcagctgcaaagcgcctgggattacgcgcaacagggtggacgcgccggcggcggccgggtgatcgtcgaagggttggtaagatttgattttgaaattacgttgctgaccatcagcgccgtggacggcgtacatttctgcgagccgatcggccatcgtcaggaagacggagattatcgcgaatcctggcaaccgcagcgcatgtcagccacggcgttgagccgtgctcaggctatcgcggagaaggtggtgaaagccctgggcggattcggcctgttcggcgtggagctgttcgtctgcggcgacgatgtgatcttcagcgaagtgtctccgcggccgcacgataccggcatggttacgttgatctcacaggatctgtccgagttcgccctgcacgttcgcgcgtttctcgggttgccgattggcgccatccgccagttcggcccttccgcttcggcggtgatcctgccgcagctcaccagcagcgatgtgcgtttcagcggactggaaaatgcgctgcacgggcacaaccagctgcgcctgttcggcaaaccggagatcgccgggcaacgtcgtttgggcgtagcgctggcgacggccaacacgacggaactggcggtggagcaagcgaaacaagccgccaccgccgtgacggtcaacggctgatactcacggggccgcttgcgcggccccgataacgtcaatagtcttcgtcttcttcagcatcgtcatcccgcgacgcctccggtgcggcctcatgttgctcgtcttcgtcatcgaacaataccgcaacctgagcaccctgatgcttctcgcgaatttcctgcgcaacgcgagcaatggcctcaccgctgctcatgccctgctccatcagttgatggatgcgatccgccgcttcctgctgctccgcgtgattcagtaatggcatacctgcatgcatgtgtcgttctctccggcaaaagggagaaggagtatacgcgctaacgcggcggatcccaacgtctggtgcgtcaggccggttgcgaacagccgttatcgttgcgccactgcttcaggcgatgccgccacagcatgacatgccacccctgcttcaggccgcgcgcattggcgaacatcgctctgtcgataccgcgctgatagaactcttcggtgatctgactctgagcggccggttccggctcgcgacgaatgctgtggcaaatgcccagcgcttcgcgggtgatttgccaatggaaagccggacgaatgacgatagtgcccgcatagcgctggttgagccgctccagcatgtcgacgattttcatatagtggcgttgatactccacgttcgccttaccgatgcgacgacgattactgatcgacttgtcgtgcacccgttgacggtacagcggcgtacttaaatatttgacccgtttggcattaaacatgacttctgtcgtccagggaatatcctggtgatgtaaccccggctcgaaataaagccgatgctggcgaataaagtcgaggcgatatattgccagccatacaacgtgaataaactttcgcgatttcagcgcacgttcaaaccactgcacgccactgatcacatcggtggtacgcaaacgcgcctcgggaaaaatcggctgcaattcatcttggctggtgaaatagcgctcgccattacattgcatcacgtctaattggtgtttttccgcctgttccagcagcgtggaatacatctccggcgccagcaagtcgtcggcatcgggaaacgccacatatttgccttgggcaacggcaagcccggcattacgcgcgttagaaacaccggcattggcctgatcgatcacacgaatatgcggatgtaccgccgcgtaacggtgcgcgatctctcctgaaccgtcagtggaaccatcgttgacgatgatcacctccaaccgttgctcgcgctgggccagcagcgaggccaggaaaggctccaataattcccccgcattgtgcatcgggacgatcacgctcagcattaacgacatagtcagctcttcaatgataatgtaacaaaataataattttatttttctaaaagactcattcggcctgcgtaggcttgggataggcgtgaaacactgcaaattcccgcgctggctaatggaaccgaactggcctttctttctcaaacccgcgccagaaaagcgctgagtaattaagccattaattctaaaaggcggcgacgttgctaaaatcgggcatagcaacatctcccccgcttctaataacaagcagaaataataaatttatgaaattaacgaatctttttttatatttctcgggtattgcgccctcgatgaataggcttccagtgcatttgacgttaaatttttaacatatcgaagtataatcaatggcgcaaaaaatgccttatttaaggtttgttgagctgctgtttatgtgaactgtgcttcatgtcgtgcatggcaaaacatgcatgacgtggctgtctatggcacactagccgccagatatcgccgtcctcacagccaggtttattgacgttcatgagcgtaaccgccccaaacataaaatctttgccctacagccgccgtgccctgatgacgcttttcgccccgctttcatcgcagccttgggcgatgctgctgcattcgggctttgccgaccattcgcacaaccgcttcgatatcctggtcgcacaaccgcgcgtgacactcaccacccggggtgccgacacgcaaatcaaaagtgacggcgtcaccattcagtcgcaggaagatccgttctccttgctgcagcagcaactggcggcgcaaggctggcagccggcgtttaatccggacctgccgtttcagggcggagctctgggactgttcggctacgatcttgggcgccgggtggaaaccctgccgcagttggccgaagccgacctcgctttgccggatatggcagtgggcatttatgactgggcagcgatcgccgaccaccaattgcaaaccctgacgctgctcagctatggcgatgtggagcagcgctggcgctggctcaatagccaaaccgcacctacagaacgccctttcacgctgctgagcgactggcgcgccaatatgagccggcgacaatacggcgagaaattccaacgtattcagcactacctgcgcagcggcgactgttaccaaattaatctggcacaacgattctccgccgactatcagggggatgaatggcaggcgttctgccgcctgagcgcctgcaaccgcgcgccgttctcggccttcctgcgcttgccgcacaacagcgtactgagcgtctctcccgagcgcttcctgtggctggagcagcagcgtatccaaacccgcccgatcaagggcacgctgccgcggctggcggacgcggaacaggacgccgcgcaggctcgccgtttggccgattcacccaaggatcgcgctgaaaatctgatgatcgtcgatctgctgcgcaacgatatcggccgcgtcgcccagcctggcagcgtacgggtgccggaactgttcgccgtggagccgttccccgccgtgcatcacctggtgagcaccatcaccgcgaccctgccaaaccatacctcggcggccgaactgctgcgtgcctgcttccccggcggttcgatcaccggcgcgcccaaggtgcgcgcgatggaaatcatcgaagagttggagccgcagcgccgcaatgcctattgcggcagcatcggttacctgagcgcctgcggcaccatggacaccaatatcaccattcgcacgctcgtcaccgaaaacggtcgcatccactgctccgccggcggcggcatcgtggcggacagccaggagcaggcggaataccaggagaccttcgacaaggtcggccgcattttgccgcagctaggggagtatgccctgtcgtgatcccatcgaactcaccggcctcactgcacgcctttatcagccgttttcaactgcagctgccacaggcgacgcagatttcgcaccatgtgcgcccggcggcggtgctgatcccgatcgtctgccgcgccgagccgacgctgctgttgacccgccgtgccgactcgctgcgcaaacatgccggtcaagtggccttccccggcggcaaaaccgacgccgaagacggatcggcgatcgtcacggcgctgcgagaagcgcaggaagaagtggcgataccgccgcaagcggtgactgtcctcggccaaatggcgccgctcgacagcagcaccggatttcaggttacccctatcgtcggcctcatcccgccggacgtgcagttccacgccaatgaaggcgaagtggcggacgtgttcgagatgcccctgcgggaagcgctgaccctgtcgcgttactatccgctggatattcatcgcgccggccatacgcaccgcatctacctctcctggtatcacagccagtttatctgggggctgaccgccgctatcattcggcgcctggcgcaacaggtcagtatttagcccgcattacgtgatctgactcgcaatctggcacggttgccgacctccgcggcgggtaaagcgatcgctatcacttcatttgatcgctttttcaactaccgttccgtttgaatggttttaaaaaaactgtaaaccctctcttaaaccttacgaaatacctgtaaaataccaccgtccgagataaaccactgtagaaacagggattaagccggcggcgttcagcacggaaagctggcgcgattaccgctaatggagcttgggcgaaagcggataccccgcacaagggttcgtcccgggtaatcagtaaaaaaagcgacaccacggattatttaatttcatgcgaaaaaggcagccgaacccgcacggcccttttacaatatcgctgttccctgcgcggtttttgaccgccgcagccataacaatacgtctctttaaggagttttagcgtgattagcgttttcgacatgtttaagatcggcatcggcccgtccagctctcatacggttggaccgatgaaagccggcaaacagtttgtcgacgatctggtaaataaaggcctgatgccttctatcacgcgtgttgccgtagacgtttacggctcactctcattgaccggcaaaggtcaccataccgatatcgccatcattctcggcctggccggcaacatgccggacaccgtcgatatcgatagcattccgggttttattcgcgatgtagaacaacgtcaacgcctgatgctggccaacggcctgcatgaagtcgatttcccacgcgacggcggcatggtcttccgcagcgacaacctgccgctgcacgaaaacggcatgcagatccacgccttcgccggcgataaagaagtgtacagcaagacctattactctatcggcggcggtttcatcgtcgacgaggagaatttcggcaaggccgccgagcaagaactgcaaatgccatatccgttcaactccgcgcgcgaaatgctcgaccactgccgcgagaccggcctgtcgctgtccggcatggtgatgcagaacgaactggcgctgcacagtaagcaagagatcgagacctacttcggcaacgtctggcaaaccatgcgcgcctgtatcgaccgcggtctgaacaccgaaggcgtactgccggggccgctgcgcgtaccgcgccgggcctccgcgctgcgacgcatgctggtggcgtcggacaaactgtccagcgatccgatgaacgtgatcgactgggtcaacatgttcgcgctggcggttaacgaagaaaacgccgccggcggccgcgtggtcactgcgccgaccaacggcgcctgcggcatcgtgcctgcggtgctggcttactacgatcacttcatcgagtccgtcagcccggatatctacatccgctactttatggcggcgggtgcgatcggcgcgttgtacaagatgaacgcctccatctccggcgccgaagtcggttgccagggtgaagtcggcgttgcctgctccatggcggcggccggtctggccgaactgctgggcggcagccctgagcaggtctgtgtggcggcggagatcggcatggaacacaacctgggtctgacctgtgacccggtcgccggccaggtgcaggtgccgtgcatcgagcgcaacgccatcgcctcggtcaaggcgatcaacgccgcccgcatggccctgcgccgcaccagcgagccgcgcgtttcgctggataaggtgatcgagaccatgtacgaaaccggcaaagacatgaacgccaagtaccgcgaaacgtcacgcggcggcctggcaatcaaggtgcaatgcgactgacagacaaccccgccacccggcggggttttttatgggtaatcaattcactggccgctttttgtgacaatgtcaccagaaaaaatcctgcatttctctcatcgatccggtggttagcctgcaaattgaccttctgttttgccaaatcgaaataatttactgagttaccatcaatcttgtataacctcaggctagaattagccgagcgcaacttaaggatctatgacctgaccgtgactcggggctggattaccgaacaaggatttaccggatgttgatgacccacctcgccgcgtcccgatatcgttattaccgttggctgctggccggagcggtgggcgcggctattctgttggtatcgctgtatacccgttactatcaagaggtcaaaagtatcgagctgagccaacagacattggccacccgcaccgtcggcaagctcaaccagttgttgacgccggctcagctgcaggcggagcgcagcatggacatgctggaccagccctgcgagaacgtttcgtcgaccctgcgctttcgcgccgcgcagaatcaggcgctacgcgccatgttgctggtaaaaaacggcattatttactgctccagcctgtttggttcccgtcattatcagctggccgcggtaatgccgaccttcgtcaacagcagcgccaggctggcgctgcgcccctcgctggcggtgagcaaaggcctgcccacgctggtgatgtggacgccatccccccacgataaaaccagcggcgtgctgcacgtgtttaatatcgagctgctgtccaactttttactcgagccgcaggagccttacgttcagcgcgtggtgctgaacgtggctgacagcagcctggaatacggccgacgcgaaatcctgagccgtgacaccctgaccaacgatctgcgctacaccgccggctctgcgctatacccgttctcgatttcgctgttcggcccgcagatcggcatgctggcgctttccgcactgccgcgccatatcccgctggcgctgctgatcagcctgttggccgcctatgtggtctatctgctcaccgctaaccgcatgagcctgtcttatcacatcggccatgccatcacccatcgcgagttccgcgtctattgccagcccatcatccatagcgacaccgggcgctgcgccggcgtcgagatgctgctgcgctggaaaaagaagcggcaagggtggatctcccccgacgtgtttattccgctggccgagcagcatgagctgatcattccgctgacccgttatctgatgaacaccgtgacggaaaatctgcagctgttcccgccgcgaccgtcgttctacatcagcatcaacgtcgccgccgaacactttaaaacgctcaacatcatcgacgatatccgccggatttggctgccggcgcatccgatgccgtcactgatgctggagctgaccgaacgcaccgcgctgtcggcgatccagcatgaccagatccggacgctgaaagacatggggatcatgctggccatcgacgatttcggcaccggccacagctcgctgagctacctgaagaaccttagcccggacgtgttaaagatcgaccgcgggtttaccgcggccatcggtaccgacgcggtcaacgccacggtgaccgataccatcattacgctggcgcagcggctgaagctgaagctggtggctgaaggggtagaaacggcggaacaggccgactatctgcgctcgcgtgaggtcaatgccctgcaggggtattatttcgccaagccgatgccgatccacgttttcccgctgtggttgcagcagtacgaatcgcgcgtcaggaaaacagaagagaatacgccggaggcctgagcctccggcgggtgggttacgaatgcgccggttcgtcgaagacgacgcgggtgacacgcaccaactcaatgcgatagtcggagacctcgacgatatcgaaacgcaggtggttcagttcaatggtgtcccccaccaccggcatctggccgtagtgggctaacagcagccccgccagagtggcgtagtctgcggttgggctgaccaggtcatcgcaggccagcgcctgttccagcgagtgcaggtcggtcccgcctttgaccagccagccgtcgccttccgccacgatgtccggcgtttcatcttcgtccgggaactcgccggcaatcgcttccagcacatccagcggcgtcaccagcccctgcaccacgccgaactcgttggtgaccaccaccaggcgccctttggcgcggcgcagcaccgccagcagcttgatgacatccatggtttccggcaccacgatcggcggcgtgcgggcggcaaactcggcgatatcttccccttgctccagcgccaccagcagatccttggcgcgtaccacgccgacgatctcatccacagagtcgcgacacaccgggaacaggctgtgcggcgtatccagcaactgtgcgcgcacctcctcacgggagcgctcgcagtcgacccaggagatgtcagtgcgcggcgtcatcacgctgcgcaatgagcgcgaggccagcgtcagcacaccgctgatcatataacgctcttccgccgcaaaggtttcatccctcggcaacgccaccgcgtcgtcaggctgctgtgcgcgctgctgccccatcaggcgcatgatcgcttccgcggtgcgctcgcgcatcgggcgacgcgcctgatgcttgataaagttgcggcgcgcgatctggttgaacaattcaatcaggatcgagaagccgatcgcggcgtacagatagcctttaggaatatgcaagccgaagccttcggcgatcaagctcagaccgatcatcaacaggaagctcaggcacagcaccacaatggtcgggtgcgcgttgacgaagttggtcaacggcttggatgccagcagcatcaccgccatcgcgatcaccaccgccgccatcatcaccggcagatcgttcaccatgcccacggcggtgatcaccgcatcaagcgagaacaccgcgtcaaggatcacgatttgcaccaccaccgcccagaacttggcgtaaccgcggttggcgccatcctggtgcgtctgcccttccagccgttcatgcagctccatggtggccttgaacagcaggaataccccgccgaacagcaggataagatcgcggccggagaagctgaaatcgccgacgctgaacagcggcgtggtcagggttaccatccaggagataacagacagcaggcccaaacgcatcagcaatgccagcgacaggccgatgatgcgcgccttatcgcgctgcttaggcggcagtttgtcggccaaaatggcgatgaataccaggttgtcgatgcccagcacgatttccagcaccaccagcgtaagcaaccccgcccaaatagaggggtccattaaaaattccatatcagactccagagaaaagtgggaatgagcgcacgccgctcagacgtgacgatgccgccgctgcatgggcgcagtcgacaatagcaaagtgacgggatgggattaccgggagatggccgaagggccgaacaacatatgcaacgccagcaggtggcgggtgaaacctggaaaaacagttacttcggtgacagtccatagggagggctgaggcccttcactccttagtgatgaaagaggaaattactgtatcaggatttttctgggggacaaagcggctttttcaacggcggtttagggtgacgccacgccatatcgtctgcgacagctaagatttctccgagcattcaatagcggagcagcgtcacaaaaaatattttttcactcactaaaataaatctcgcgttcgtgaagtatcacgcacaggcatttgatactgcgtgagaaatgttaggcgtgcgtttctttttttctaccataatgtatctgaaccgcggaagtgactgccaagacggcgcggagaaacgacacaaaccgcgtctggagttcaacgaggaggtagcgagtggcaatagctattatcatcggcacacacggggctgcagcggaacaactgctgaaaacggcggagatgctattgggcgagcaggacaacgtcgcctttatagacttcgttcccggtgagaatgccgaaacgttaatcgtcaaatacaacgaaaaaatcagtggattggataccagcggcggcgtgctgttcctggtggatacctggggcggcagcccgttcaacgccgccagccgcattgcggtcgacaaagaaaactatgaggtcgtcaccggggtcaacatcccgatgctggtggaaaccttcatggcgcgggacgacaaccccgctttcgatgaactggtggcgctggcgttggaaaccggccgcgaaggcgtgaaagcgctgaaaaaaccgcaggaagaacccgcaaaacccgcggcgcccgtcgccaaagccgctgcccctcaggcgccgctggggccgaacgaccacatgaaaatcggcctggcgcgcatcgatgaccgcttgattcacggccaggtggctacccgctggaccaaagagaccaacgtcagccgcatcatcgtcgtcagcgacgaagtcgctgccgaccatgtgcgcaaaaccctgctgacccaggtcgccccgccgggcgtcaccgcccacgtggtggacgtggcgaaggctatccgcgtctggaacaacccgaaatacgccaacgaccgcgtgatgctgctgtttaccaatccgaccgacgtctggcgtctggtggagggcggtgtggatattcaatccgtcaatatcggcggcatggcgttccgccaggggaaaacccaggtgaacaacgccgtttccgtcgatgaaaaagatatcgaagcgtttaagaaactgaacgatcgcggtatcgagctggaggtgcgtaaggtctcgtccgacagccggctaaaaatgatggacctgattaacaaactcaattagtggcgcctgccgctgattattttactcagagcttttttggtcataggagaagtgcaatggagatcaccactcttcagattgtgctgatatttatcgttgcctgtatcgccgggatgggttccgtcctcgacgagttccagttccaccgtccgctggtcgcctgtaccctgatcggcttcatcctcggcgatatgaaaaccggcatcattatcggcggtacgctggaaatgatcgccctcggctggatgaacatcggtgcggcggtcgcgccggatgccgccctggcgtccatcatctcgaccatcctggtcatcgccggcgggcaaagcgtcggcgccggtatcgccctggccattccgctggcggcggccggccaggtgttaaccatcatcgtgcgaaccctcaccgtggccttccagcacgcagcggacagtgcggcggagcgcggcagcctgcgcgccatcagctggatccatgtcggcgccctgctgctgcaggcgatgcgtatcgccatcccggcggtcatcgtcgccatctcggtgggcaccgccggggtgcacgccctgctcaactcgatcccggaagtggtcaccagcggcctgaacatcgccggcggcatgatcgtggtggtcggttacgcgatggtgattaacatgatgcgcgccggctacctgatgccgttcttctatctcggtttcgttaccgccgccttcaccaacttcaacctggtggcgctcggcgtcatcggcgtggtgatggccgtgctgtatatccagctcagcccgaaatacaacaagtctcaggttgtccaggccggcccggctaacgcgaacgatctcgataacgaactcgactaggaataggtgagagaaatggttgatacaactgctcaaaagaaactcacgccggccgatattcgcggcgtattcctgcgttcgaacctgttccagggttcatggaacttcgaacgcatgcaggcgctgggtttttgcttctcgatggtgccggtgatccgtcgcctgtatccggaaaacaatgacgatcgcaaacaggcgatcaagcgtcacctggagttcttcaacacccacccttacgtggcggcaccggtactcggcgtgaccatggcgatggaagagcaacgcgccaacggcgcaccgatcgacgacgccgcaatcaacggcatcaaggttggtttgatggggccgctggcgggcgtcggtgacccgatcttctggggcaccgtgcggccggtattcgccgcgcttggggcgggcatcgccatgagcggcagcctgctcggaccgatcctgttcttcgtgctgttcaacctggtgcgcctgctgacccgctattacggcgtggcctacggttaccgtaaaggggtggacatcgtcaacgacatgggcggcggcttcctgcagaaactgacggaaggggcgtccattctcggcctgtttgtcatgggcgcgttggtcaacaagtggacgcacgtgaatatcccgctggtggtgtccaagatcaccgaccagaccggacataccaacgtcaccacggtgcagaccatcctcgaccagctgatgccgggcctggtgccgctgctgttgaccttcgcctgtatgtggctgctgcgtaaaaaagtcaatgcgctgtggatcatcatcggcttcttcgtcatcggtatctttggctattggattggcctgctgggcctgtaatcgttcgaaacggccggggggcaacccccggcttttttatgtgtggagcaagagatgtcactgaccgacgccgtactgatgctgtttatcgccctgctgttgctgtattcgctgtacgacgaattcggcatggatctgctgaaaggcaaaacgcggctcaaagtgccgctcaaacgccgcaaccgcctcgacagcctgattttcgtcggcctgatcgccattctgatttaccgtaacgtcaccgccaacggcgcgctattaaccacttatctgcttatttctttggcgctgctcgccatctatattgcttatatccgctcgcccaaaatggtgtttaaagcgcacggttttttcttcgccaatgtttttgtcgaatataaccgcattaaagccatgaatttatcggaggacggcattctggccatcgacctggagcagcgccggctgttggttcaggtgacgcacctggatgacctggagaagatatacaactttttcgttgataatcaataaataaagtgaaattaattttattctcgctcaaaccttgcgctgtctgtggataattaatcggcagcgccatttcatttctgactattatttctgcaacattgttacccgtgtctacattatattcccgcatgaactcagattaatgaaaacgagtctcaattaagaacaaaaatcgcgccagaataaagttgtcggtaccggaaataatatggtatggttgcgccgtcattggggagtagccggtttctggagaataaaacgccagaaacgcccgtatcaacatactcgtttcgccgtatgaaacgtggtgcgggcagccaggtaaggttggcgagaccatagacacgtaactccgtcgtttggttgggggtgggttacgtgtatatggagccacccggccgaggctatttcacatgaacctttcagcaacgcttattctcgctttcggcatgtccatggatgcgttcgccgcttctatcggcaaaggcgccagtctgcatcagccccgtttccgcgaagcgatccgcaccggcctaatcttcggcgtggtcgaagcaatcaccccgctcatcggttgggccatcggcctgttcgccagccaatacatcatggaatgggatcactgggtcgccttctcgctgctgttcattctcggcatgcgcatgattgtcgaaggggtgcgcaacaggcccgacgaagaagagaaggtcaaacgccacggcttctggatattggtggccaccgctatcgcgaccagcctggacgccatggcgatcggcgtcggtctggccttccttcaggtgaacatcgtgcacaccgcaatggccatcggctgcgccaccatgatcatggcaacgttgggcatgatgatcggccgctttatcggcccgctgctgggcaaacgcgccgaaatcctcggcggcgtggtgttgatcggcatcggcgtcaacatcctgctggagcacctcggctacctggcctgaggcgaccgaactgcaaaaaaaacctgccgcggcaggtttttttgtttctgagttccaggccccttaagcgcgacgtcggtacaacgccaacacgaaatccgtctcgcacacaaactcgccgccctcggccaaccgctgttgcacctccggcgtagcgcgccaggcgaacggcgtcatctgcagcagattggcggcctgcgcgcccggtagggtcatcgtataggccagcgcctctttgcgctcgcagtcgaatccgtcgaactgttcatcctgttcggcatgcagctgcacctgctggtacacctgctctttcagctggtacagatgacgcgggcccggcgaaaccgtcagcaccacgccgcccggtttcactacccgcgccagctcctccgccttgcaaggcgcataaatgcgcaagaccgcgtccagcgccccgtcggcgaacggcaaacggtgactggaggcgacgcagaacgagaccgccggataacgtttggcgccataacggatcgccaccttggcgacgtccagcccatagaccgccatattgcgctcctgagccagccgtgcggccacggcggcggtgtagtacccttccccacagcctatgtccaataacgcgcctgcatcggccgccagcgccgaatccagccactcggctacctgcgcttgcaacggctgataatatccaccgtcgagaaacgcgcgccgtgcctgcatcatttccgcgctgtctcccggctgcttcgatcgtttgtgctgcaccggcagcagattcacgtaaccttctttggcttgatcgaactgatgattgccgtcacaacgccagtgttgtgatgaaaaatgcagcggttgatgacacagggggcagtgataagacatgaatgggcttccagaaagacagggcgcggctagtctaaagaaggcgtcggcttgatgcaaggcgcatccccgctcgctttcgccgccaacaacatctggtcaagcggggaaaaagctggctacactgagagtctgttttctcatgcaggtgaacataacttatgagcgatcgttccgcgctgctcgatgcggtgccccacattcagcacggcttcggcagcaaactcgcgctgctgcccgggcatctgctgccctacagcgccacgctgccggaaaaaaaacaggtgcacggcacccgcatcgtcgatgtgctgcagccggcgcaggcatgcggcgaggccgacggtttctatactcgccagcccggcattctgctcagcgtactgacggcggactgtttgccggtgctgttcagccgccgtgacggcggcgccatcgctgcggtgcacgccggctggcgcgggctgctggacggcattctggaacagatggcagcacgcattcgccaggacggcgacaccgccgattgggtcgtctccatcggccctgccgccggctcgtgctgctacgaagtcgatgaagcgctggtggagagttttaaacagcgcctgccgctgcccgccacgctgatcagcccgcattaccggcatctcgatttggccgcaattgccgaatacaagctggcggcgctcggcttcgccgccgttgaccgcgccggcagttgcaccatctgcacgccggacgtcgacccacagcggccgcagcgcttcaaatacaccagctatcgccgcaacagccaccggcgcgcgcaggatccgacgcatccggggatcaaaggccgcaaccagtacgccggcatcatcatcgccgccggatgacggaaacgaaaaagcccgcgcgaaggcgggctttttgtacagctgacgctgattagatagcagtaacgtttactgcagatgggcctttctggccatcttggatttcgaactcaacgttctggccttcagccagggttttgaagccgttaccctggattgcagagaagtgtacgaacacgtctttgctgccgtcagccggggtgatgaaaccgaaacctttagactcgttgaaccacttaacttgacctttgatctttgccatcttgagtatttcctttggattgtttaaaccgcccgagggcgttacatagacaaactagagtcgttactgcttgaggcactaagataaggatcggcagagaagcggtattcaacgctaacgtctttactcagaacttctttactgaaaatgccacacatatacagaactgtacctcgttttacccagatgcgttatcacatactctgtatgcgatggcaagccatttttaatcactgaacgacatgtcgcacatatttgaaacggtcgagcgcaacatttgcttaaataggccaaaagatgttgaagcatcggctattttctgcttgccaaaatcactgtgccagaccccgcattctgctggagttttaacaaaactttcatcgtattgacgcctttgcgtctcatcatttccgcttttttgccgcttatagcgttaaaaaatttgaatctttatggaatttgatatgcaacatctgaatatcgatgaacgggggccaatttattcatcgctcctccgaccatttaccgccggaaagcccattcatcatcggctttccgccctgccgccaaacggcgcgggcgagaacggcgcacgggtcggcggcaacgtctccaccctgcacaacggatgcataagcatgcaaagcgccggcacatcttccgctgcctgtggtttcatcataaataatccgaatgtcattaacctcaatagccggaataatcttatcaataacgaaagttcaacgttgaattaaatcctgaaaatacgggggttatttgaatcaccacccgcacttatcaattctgctaattacagctgcgctttcaaaccattgactttattcatcccgctgcgccgccgggtgattaggtaacgcaggcgatgagccctgcaacgcgatgcgctcgccaatcttcagcgggaggaattgatgctgctccaaccccgcctcgctcagggccaggttcagctgctgcggcggttcgtccagcgattcatccgccagttcgaatactccccaatggataggaatggctcgcggctgattcagttcgcgatacagcgccaccgactgctgcggatccatatgctgctcctgcataaaccagcgcggcgcataggcgccgatcggcaacgcagccacgtcgaacggccccagccgttgaccgatctccgccagccgttccgaataaccgctgtcgccggaaaaataaaaccgtagcgccggatggtggattacccacccgcaccacagcgagcgattgcgatcccacagcgtgcgcatgctccagtgccgcgccggcgtggcgtagaccgtcagctcgcccagtgacaggctctgccaccagtccagttcatgcaccttcagccggtagcggcgaaaccagcgcttcaaccccaacggcacgatgaactcggcctgtgggaaacgccgcgccaattgccgcaccgtgcgcctgtcgaggtggtcataatggttatgggagatcagcaccacatccaccgccggcagttgccccaccgtcaacggcggcggcgttctgcgctttgggccgtaaaagctcagcggcgatgcacgttcggacaataccggatcgatcaggatatagcggccactcaatcgcaatagcatcgaggcatgccccaaccaccagacgctgtcgtcgctgccactgagatcggcaggttgccaccagcgctgggtaaattgcgcataaccctgctgcggcggcctgggcagcccctgtcgcttgcgttcatcttgccaacgccgaagatcgccctcctgacgccgcgaaggttccaggttgcgaaatccctccggcgtatgatgcgccttggccgcgtcgtaataacggttgattcttttcatcctgccttttctcccgaccacagcgccctgcacgggcatgactttcagtgtaacaaacccgatgaagctcgcactttgtcagccgtgcgctgcatctcgggaccttttgccgtatgctgttgtctcactccagtggaaagccagggccgccaagagcccgttaagactctcttaagatctttgtgattgacttgtagggcatacagaaaaggagaagttatgagtcgttctacatcccgcaaatcaggcatcggcctggggcgtcgtattcgcagcgcgctgctcgcgcagaagcaatactggaaaatgtatttcgccatgaagctgcgccggctgcgcgtgcctgcaccgttggtgctgctgggcggttcgctgcttgggttcttcatgctgactctgctgatgctcagcgtagtcgccatcgacgtcatcagcaccctgctgctgctgtgccggaaactgctgggacggggtgacggtgaggggcgcgcctttatgccgcgcggctgacgagaagagcgcggaggcgcaatacgcctccgcgcgcagattaacgcttggcgcctttgcggcgcgtcagcatgaacccgccccacagcactgcaacccacaccggcatcaacagcaccgaaatgcggatcccttcgctgaaatacataatcaccaaaatcaggccgaggaacgccaggcacagatagttgccgaacggataccacagcgccttaaagctcggaatgacgccctgacggttcttggcggcacggaacttcaggtgcgccaggcagatcatcacccagttgatcaccaacgttgacaccaccagcgccatcagcagctcaaacgccttgccgggcatcaggtagttgatcagcacgccgattgaagtaatcaacgccgacagcgcgatggacagcaccggcacgccgcgtttattcacgcgcgtcagcacctgcggcgcattgccctggctggccagcccgaacagcatgcggctgttggcataaacgccgctgttgtaaaccgacagcgcggcggtcaagaccactacgttgagcaccgttgccaccagattgctgttcagcgcatggaagatcagcacgaacgggctgccgccctccaccacttgcccccacggatagagcgaaagcagcacggtcagcgagccgatatagaagatcaggatgcggtacaccacctgattggtggctttgggaatgctgcggcgcggatcggcggcttccgccgcggtgatgccgaccatctccagcccgccgaacgagaacatgatcaccgccatcgccattaccagcccggagaagccgtgcggcataaagccgccctgctgccagaggttggtgatgctggcctgcggcccgccgttaccgctggccaacagccaggcgccgaagacgatcatgccgacaatcgccactaccttgatgatggcgaaccagaactcggtttcgccgtacaggcgcacgttcaccaggttaatcaggttgatcagcacgaaaaacagcgcggcggaggcccaggtggggatctccggccaccagtactgaatgtagatgccgacggcggtcaattccgccatgccgaccagaatgaacattgcccagtagttccagccggaaaggaagccggcgaaatcgccccagtatttataggcaaagtgactgaaagagccggcgaccggctcctccaccaccatttcacccagctggcgcatgattaaaaacgcgataaaaccgccgatggcgtagcccagcagcacggcggggccggccattttaatggtttgcgcaatgccgagaaataaaccggtaccgatggcgcccccgagggcaataagctgtatgtgtctgttttttaaaccgcgttttagcggagtatcctgatgctgaccgcccatcttatcctcatatggcgtatacccttgccgctatcggccaagatttcaccaatcaataaatgtatctgcgggcggctttttaacacttaaccccgtgagcatcaaggagaagcgccccgagacggcaggccggagcgcgatttttttaccgcgagaaagcggataacggcagcgtttagccaggcataccgcacagtttggtcagattgcgcgcgccgatcatcagcgtggcgacataagattggctacgcgtgaccacttccaccgccacgcgatcgttttgatattttatcaggtaggtcgagggccagccctgacggcgctggccgaagctttcggcatgacgatcgatcgccgcatgggcaatcaccagatgagacaagtttttatcacctttgataatgcgcttcataaacagcctccgccaacgacagctctgttattagaaaaaggagaaactcttaccaatcaccggtattgttcgactcagttagcctgtcggctcatcaggaagcagatcatcgccgcgcgcagcggactggcgctgtccgcctgccattcaccgccctgagtgctcatgcgcgcctgccactgcgggctgtcgctttggttatcggggttcagactgattttgttggcgcaaatgatcggccaggcatcggagggattcttgcagtaatctttacctttcacaccaccgtagggataccacttgtccgggttctctccggtcagcagcgcaatgctgcggttcacttcggcatcgctttcttcgtaccatttaatcatcggcttcatccatctttcgtaaggttcgcgctacattacgatgcctgtacgacagttttatgacagcgccgccggttttcacattatctctactaatgctttgtcccctttatctttccttagcgtctgcgtaaacttttctccctgttcagcgcccggagaacgcatgcatgttgaccggccttaaccatctgacgctcgccgtcagcaatctcgatcgcagcttcgatttttatcggcatctgttgggatttatcccgcacgcccgctggcaaggcggcgcctatctgtcgttagggccgttgtggctatgcctgtcgctggatgaaacgcgcatgcaacaacgcgagcgcgattacacccattacgccttcagcgtcgcgccggaacacattgagcaggtcagcgagcggttgcgccaggccggcgtcgaagagtggaaaagcaatcgcagcgaaggcgaatcactctattttctcgatcccgatgggcatcaattggagatccatgccggcgatttggccagccgcctggcggcatgccgggaaaagccgtatcagggcatggtgttttactgaggcgccccggcgacgctgccgtcggccggggcatcatgctcaacgttcggggatgaaacctttgaaatccagcgcggggttgagatcgtcgtcagcagcagcggcgccgtctgcgccggcgcggtgcgccatacgcttcaacagcgccgtttgctggcgttgttgctcggcaatctcctgcagcaggcgaatctgctcattggcgcgcacgctggcgcggttcaccaggaaccagagccacagcccggccagcaacgccacggcggcgagggccagcgacaacaggccgttctggccaaaacctaaatcgtacatggacaaccctatctactgcgaaattcaggccgccatcttaacactcgcggcggccgtgcgaacatccctgccaaaaattgcttaccagggcacgaagcgggtcaccgaacagatgcccaacgcaaaatttccaccatcgtcgcaatagctgtccagcgccagcaggtagaaaaacaggcaggcagcgacggccgtcattatcacgaggattttttttcgcaacaaatttagcagcctcattgttatcttggtaatctatcgcgcatgttatcacagcgaagttaaacgaagtttaactttccgtttagatttctggctatcgcccggttttcagactgttacccttgccctcgcataggcgccgtggctagatgaaccctcagggataacgaggaaatacgatgagcaaattgattaggtgggtattggtgttggcggtcatttacggcggctttttgatctcgggctacggcgtgctgatcggcagcaacaaaaacgttggcgggttagggttgcagtgcaaatacctgacggcgcgcaacgtggcgatcgcccagtacgtgaatggcgacaacggtttcatcggcatagccgactgcccgctgttcaagaaaatcgaaacggtggtggattaaccgccaccgcccgacgccgccgctttgcggcggccccgcctcagttgcgggtaaacttcatctcgatcagcgcaatcgccttgtcaatcgctcggcgggtcaccggatcggcgccggcaggatgcgtggagaaatcgatgcttttgagctgacccgccatcttgtcgcgcacttcggtcggcgcaatcacgtcgataacgtccagaatctgtttgatgaccagttggcaagcgaccagatcggaagccagttcctgctcgttgctcagcatgtcagacataataaatttccttcttgattcaaacgccgcacagaatagcatggcgtccgcgccattgcccgcactccccgtctttttccccattctgcgcaccggcgggcaaaagcctgcggcggattggcctatacttgctgcatggcggtggtaaaaaccacccgcaagccacaaccaacaggagaaagttatggcgaatcacaatgtgaaatcctgggcgacagtgcgtgaaacttcggtggaaatcgccgaagccatttttgagctggcagggaacgatgaagtgttggcgcagaaaatctgggaagaaggcagtgatgaggcgttggaaaaggcctttgccaaaaccaccgccgaccagctttattggggagaggaaaccgtcgagcggaaaaacgtttgagcggttacgcaacaaaaagcccgggtttctgacccaggctttcccgattagcgctcgccccgcttagcggcgtgcatatcttcttgctctcacggttcttcacctcccacaccttccgcattcttcatgctcatcaccggcgtcgccataaaagcgccgacgcccacgattacaaccagagtaataatcactgtcattaacatgcgatcaccccatcaacgttgagttgttacggctgactctgttttggcggttcttgctgcggctttctttgcgtcccccaccgcggcggcgacagtctcagattagccgtttttcctttcggctgacaagcggcggtcaaacggtttttccgaataattgccccccgtcaccggcggcatttttgtcgacggcggcaagttgtgtatacttcaccgctatgtaggtctcacactgacgcactgatgatacaagaacaccacctctcgttggtctgcgccctcagcaaatgggtcgaaactcacctcggacgagtgatccatctcgaagagctggccgagtactccggctactcgctgtggcacatgcagaagctgttcaaagaagcgacagggatttcgctcggtaaatacattcgcgaacgccgtctggccggcgcggtctatcaactgcgcagcagtgaagcgtcgatcttcgacatcgccctggactttggcttcggttcacagtcccacttcacctacatgttcagaaagcgttttaatatcacaccctatgatttccgccaggatttgagcgttgatctgcacatcgatccgccgttgcacgtcattcaccaaaaatccgcctgaagcccgccgcaagtcggcgggttaacgcgccccccagaccgccagcatcgcgatcgcggccggcagcgcctgcacccacagaattttgcggctggcgctcaacccgccgaacaccccggccgccagcacgcacccgagcaagaacagctgcagtgccatatccccacgccagtagctccataccaaccccaacgccagaaagccgttgtacaacccctgattggcggccaacacccgcgtggctgcggcgaactccgccgttgtgccaaatgcgcgcctgccgaggggcgtacgccacaggaacatttccagcaccaggatataaagatggagcgctgcgatgagcagcagcaaaatatcggcaaagaatttcatgatggttccagtcgtttattgaagatgccatcaattataaacgccttcgctcacctccccatcggcggagataaaaaaacccgccgaagcgggtttatgcaggagtcattttttgaggttagtttaatacggcgaccaacaatgccgcgacagagacccaaaacagcgccgtggcaaccacgacatgggacaatcttgcacgataaagtacctggctcataatgacctcactgacatctgactaacgggagacaacctgacttcctgaggattatcctaaacttcttctcactgtcgttatatgcgccagatcacttttccgccgagaaaccttatattgtcgtaaagctggagccgcgatcacattaattacgccttattagagcgaaataagccgaataatcgcggcgattatatcctaacgctatcaaacatcgttccagggcaggcgcggtgcggtcatgcgctcaccagaataaccgctaaccggcgggaaacgcggcgcgccttgttcccaatcatgctgagcccgagtaatttcagccttggtatggccaacgaaattccaccagataaggatctcttcgtttaatggcgccccaccgatgagtaatccccggctccccttccgtgcatttaacccaatagagttattctttatgcccaaataggcgaattcatcaggtgaaaaggtttcaccattaagttcaaatgcaccaataaggggcaaaaagccgatttcataatcatcgcgcaacggcaattcgattcttgccgcttcttcccattccagatcaatggcgattaatggcgaaagagtgaacaccggtgaacaataagcgccaaattccccaaccaacaaacgatgattcacgccattattctgccactgcggcaaatcaggataatgatcgaagcgtggtgccatgtcggcatgttcggccggcagcgcgatccataattgcgcagcatgcaatcgccgttgctcacccaccgactgttccgtatgcgcaatgccgtgccctgcggtcatcaggttaacctgacccggacgaatcacctgctcactgccgaggctgtctcggtgcagcacctcaccttctatcatccaggtgaacgtttgcagcccggtgtgcggatgcggccccacatccatgccgggcgaagtgccgttgaataccgtcggcccggcgtgatcgagaaaacaccaggcgccgacggtgcgccgctcccgggttggcaacgcacggttgatcggaatgccccccacttcggcgttacgcacggcaatacgttgtatctggcgcacaccgtcaacgacggggcactcgcgtgaaggtgaagagagcgtaggacgtggctgactcatcgcaaagacctcctgaatggcgccgattcgccaagggtaaccgcccaagcttaacacaggacagctcctccgcagagcggcgacgtgcaggcacgttcgcgcggttcagggggctttgatatagcagctcttgatgtctatatcgtcatgcgcgtgcctgagatcggagaaataggtcacgccaaagagaattgataccaccagcagcacggacaccaacaggccgatgatcgccagcagtttggtttcatcatggagattaggctccattttatctcccctagttaatcgcgtcaggtcacccacagcgtgaccgccagcgtaaagataatcagtgagcaggacgccaccgccaatacgacgatcgcaaattgcgcatcacccaaggtttctcgatagtttttatccgttgaggcgttacgctcttgtttcactaaatcggttttcactcgttcaactgctgcattgctgtttgacggggcaaaacatcccctcagaataaggcgccaacgtcgctgacttggtcgctccggcctcaaccgggggatgacgctatcaattttccccatcagggtcaacaccgcgcctgccggcgagcgagcaagtacacaggggagatgtaactggcatggagagcgcaaggaaataagagacgccgattgcagagggcaaaaaaaaagcccggtacgtgaccgggccagggtagaccgacgcgttattgcgggatacgcaacacctgccccggataaatcttgtccgggctcgacagcatcggcttgttggcttcgaaaatcttgttgtacagattggcgttgccgtacatctctttagagatcgcgctcagcgtatcgcccttcttcacggtatagaagcggctctcggcgtcggattgcgctaccgccaccttgtcttccacaccgctgatacctgccacgttgccgatagccaccaggatcttctcttttaactcctggctgacggcgtcgccggtcactacggctttaccatcgaccacctgcacattcactttgtcggtgcccggcaggccgctcttatcgagatgctccttgagtttggcgctttgatcttcggcggaggcattgccggtgactgtatcccacagtttttcgcccgcttctttgacgaagttaaacaagcccatattcactccttttgatggttgcagtaatgcgtttaagtaaggcttgttaagcttagcatcgacaaaaggatatgccatccgctcacggcgtcagaaacgggtagagtattccgaaagtgtcgtcagcggcgtttccatggcgattaatcgtgcaatgatgctgaaaaatcgcgcttttctacctacactgttgcagacaaggcaactcgacgaaggaggcgtgcgacgatgtacgcattggtgatgtttgtctgttatctggatggcggctgcagtgaaatggtggtcaatatattgcgcgacgagccgcaatgcctggtcgcgatgaaggaacagaacttgcgacacgccggctgttatcccatggaagagtttatcgacggcttctggttgccagccagcgaatattcggatttttaacctgctccccgcgcaatgctgaggaatttctgatttcatcggaaacttcgtcttcctctgaggcataaggccgctgttttgctaaattgcggctcccgaagaagagagagacagagaaaggtcatgccagcatcggctcattccaacgagcaatatgaaactctgctgcgcgacgtcagcctggcgttaggcgacgcagtgttgcagttaatccaaaaacataaaaaggtatccggcggcaatattctttcacagctggtggacgaaatagaacgtgagcaggatcagcaacgtttcgtcgcactgcgttccgccattgaactggtcgggctggcgcccaaaggctgagatcccgataaaacaaaggcagggcttgcgccctgcctgattaccaatcccgacacaggatgaaggtaatgaaattgcagattagaaacgatacgtcaggctgacggcaacgatatcatcgttggccagtttcagtttgttatcgtcgctcagctggttgatttgataatcgacgtaggtgtacatatttttgttgaagtagtaagtcgcccccacttccacgtatttcaccaggtcggcatcaccgatcccttcgatatccttgcctttggactgcacgtaggccacggaaggacgcaggccgttctcgaattgatactgagccaccacttcgaagttttgcgttttattggcgaagccggaagtgccgttgacgctgatcggcgtcatgttacgggtttcggcatacatcgcagccaagtaaacctggttggcgtcgtatttcaccgcggtggtccaggcggtagcgctgtcacccttgccatactgcagcgctttctgagcgctggtgcggttggaatcggagaacgccgccgctacgccgatgccggaaccgccgatatcctggtagtccagagacaggccgtaaccgtcgccgttttgcttggtcacgctgcggccgtcaccgtcgtttttaccctgatactgcaccgccaggttcaggccttccaccaaaccgaagaaatcacggttgcggtaggtggccaaaccgttggaacgggcggtcataaagttatcggtatagctgtaggagtcgccgccgaattccggcagcatgtcggtgtaagcctcggcgtcatacaccacgccgtagttacggccgtagtcgaaagaaccgtagttgccgaatttcagccccgcgaagcccagacgcgttttggtgccggcggtgccctgcgcttcgtcgtgattggcctggacgttgtattcccactggccgtagccggtcaactggtcattgatttgcgtttcgcctttgaagcccagacgaacataggtcatatcaccgtcgttggacttactgtcgctgaaataatgcttggcgttaacgcggccgtacaggtcgagtttattgccatccttattgtagatttcagccgcgttggcgaaggaggtgatcgccccgagggcgacagctaaggctaatacactgcgtttcatcatttattttcctagatattataattagaaccctgcccgtcacgcccaatttataatttgggctgtgattttatcttttggtattttatgagctcccctaatgccggggtgatgtgacattagcatcatgaatcaaaacttaaaatcaaaaagttcatgaaacaacgaggagaaagcatgtttatgtgtaactaaatattacaaaaaagaaatcactcaacccattgaatataagaattttttatcacataagttataaccaaaacggtgcaatgcaccattatagtgcaatttagtttcgttttgcgtgctttctgcgcgattcaaaagtaacaacaagattagcatggttattaaaaacgttacttatttcacatttttatcttaacaaactcaccaggcaattaaggctttcagataacgacctgacactgccttctattcattcgtataaagacgcggattagtaacgaataaaattcgccttacgggaataaaaatagcgggaaatagcagattaaaataatgaaaggaataacggcggcgcgctgacggcgccaccgtggataaatcaatacagcgtagagcgggaaacttcgctcaacaacatgccggcacgcaggcccaacgccacgctggggttagggaacagtatccacgccccctcctggcccacgcgatagtcctcctgcggttgctcgcacagcaacatacccggttgcagttcggtgaagttggccgtgtcatcgtccagatgcagtttgaaatcttcgctgtgcttgatcaacgagtgcatcacacggaaaacccgaatctcggcgcccgcacgcgtcggcagcgccccttcgctgaccgccgcccgcagagcgcgatcgatggcggcaaactgctgcagatcgttgctgccgaacggccgcgccttgcccagctcgagcgtacagctcgccgcattgagatgttcgctggagtaatggctaaaagtcccgcccggcgcactgtgtaccaccaacgcatccagatcggcggcatccagcagcttcaacatcggctcactgtacgggcgtttctgaaagggcagaatgccgaaacgtggcaaacgcgattcacggatggcggtgtgcaaatcgtaatggaaacgcgccgcctgctccccatcgaaaaaggcggcgagcgcacgctccaactgctgcgcgcgcacggtttcgccgctggcggcgaagttgcggtagcggccgccgaacatgcggttcatatcgctgtgcagataacgcttgccggcccgcatcgccgccgggttgcccagcaccaccaacagtcgcaccgtcagcggcaaccggccggcaaggagatcgccgaccagctgattgagcagttcaatcggcgcggtttcattgccgtgcacgcccgccgacatcaccatcgcctggcggtaaggctgtcgtggcgtaagctccagcaccccttccccctgccagcgccaccgcagctgcggtgtttcaccttgccattcgacgggttcgttcccttccagcgtcaggggcagtagatcgatcatgctgcctcccttagcgttggaacggataaatggcgccgagaccgaggatcgacgtcagcgcatccagcgcctcgcgcccttcgcgcagcagcagcggatcggccaggtcatcctgcgtcaggcggtcgcggtaatgacgatcgacccactcgttcaacgttgcgaacagccgatcgttcatcatcacgcgcggattgaccgctctcaactcttgttcgttgagcgccacccgcaaccgcaggcaggcagggccgccgccgttgcgcatgctttcacgcaggtcgaacacgcggatttcatcgatagggccgccgctgccgaccatgtcgttgaggtaacgccacacgccggcgtgctgacgcgactcctccggcacgacgatcatcatcttgccgttcggtttggtaagaatttggctgttgaacagataggtcgccaccgcgtccgctaccgagacgcgctctgtcggcacttcgatcgccaccagctcgctgtccagcgtcgccatcttgcggcgcacttcatccagcgcctgttgctggcggtaaaacgcctgctgatgatggaacagcacgttctggttgctgaccgcaatcacgtcgttatgaaacacgccctgatcgatcaccgccgggttttgctgcacgaagaccgtatgctgttcatccaactggtgcaggcgagcgatcgcctcgccggcttcgcgcgtctggcgcgccggataacgcgccggcgccgtttcgccgccgaactcctgacgaccatagacgaacacctgcacgctgcgcctggcgtagtcgccgcccaaacggttatggttggccgccccttcgtcgccgaacaacgccacctgcggcagcgcctcgtggtgggcgaaatgccgatcgtcgctgaacatcgcccgcaatacggcggtggtggtttccgcttcgatggcgcggtggaatttgttgttcaggttggcggcggtgaagtgcaccttgccgtcggcgctgtccgccgaaggcgacacggtggccgcattggcggtccacatgcacgatgccgagctgagcgccgacagcaagcgcggcgactgacgcatcgcctgcgccagcaccgcctcatcgctgccgctgaaacccaggcgacgcagcatcggcaaatgcggccgctcctgcggcggcaagaccccttgctggaaaccgagatcggccagcgccttcattttcagcaaaccttgtttcgccgccagcttcgggttcgatacgctgttttgatgctgcgtcgacgcctcgttgccgaacgacagcccggcatagtggtgcgtcggccccaccaaaccgtcgaaattgacttcatatcctgacatgtttatcccctggggatagcgtgcggcagcgccatcgcgccgccgcagacgattaacggaacgacaggcccggcgagagcgtggccggcagcgacaggctttcgctttccagcgaagccatcggccaggcgcaatagtccgccgcatagaaggcgcttgggcgatggttgccggaggcccccacgccaccgaacggcgccgcgctggacgccccggtcagcggcttgttccagttgacgatgccggcgcgcgcttccagcaacagccgctcgaacagctcgcgctgcggcgagaccaatcccaccgacaggccgtagcgcgtctggttggcgagccgcagagcctcgtcgaaatcgcggtaacgcacgatggtggtcaacggcccgaagtactcttcgtccggcacgccggccacgccggtcagctcgatgatgcccgggctgagcagcgaactgcccggctccagcagacgcatggccagcagcgatttgccgcccaacgccagcaagcgctgctgcgctttcagcatgttttccgccgcggcagccgacaccaccccgcccataaacggctgcggttcggcatcccaacggccgacgcgcagttcgcccgccacctgaaccaaacgcgcgataaaggcatcgccttccgccccttgcttcaccagaatgcgacgcgaacaggtgcaacgttgaccggcggagataaatgccgactggatagccaggttgaccgccgcgtcgcgatcctcgaaaccgtcgacgatcagcgcattgttgccgcccatctccagcgccaggatcttctccggctgccccgccaattggcgatgcaggtgatagccggtgccggcgctgccggtaaacagcagaccgtcgatatccgcactggccgccaaggcttcgccggtttcgcggccgccttgcaccagattgatcaccccgtccggcagaccggcctgcagccaaagtttcagggtctcctcggcggtcaacggcgtcagctcgctcggcttgaataccacgcagttaccggccaacagcgccggcacgatatggccgttcggcagatggccggggaagttgtaaggcccgaataccgccagcacgccgtgcggacgatggcgcagcaccgaagcgccgtcggccatcgccgtctggctaaaaccggtgcgcgcctgataggcctgcagcgaaatgcccaccttgccgatcatcgcctgaatttcggtcagcgtttcccaacgcggcttgccggtctcgcggctgatggtttccgccagcgactgcttgtgttcctccagcaaggcggcgaagcgtttcaccagctgttcgcgctgctcgaacggcgtgcgcgcccaggcggggaacgcggcgcgcgcggcttcgcaggcagcggcgacgtcatcggcgtcggcggcgttagcgcgccacagcggctggttgccgaccggatcggccttgccgaactcggcgccgcggccctgccgccagacgccgttaatcaacagtgcaggatgggacatcatgctttctcctgtgcaataagggggagcacccgcaccgggctgccctgttcgacgcccagcgccgcggcggtggcggcgttgatatgcaggcggtcgtcatacagatcggcattgaccaacagtgcgcggtaattctgatagttgtcgttggccaccagatgcaccggcgcatcggcgcgcatcggcgtgtcatccagcaccactttcaccaggcggctctgcttcaccgcgcggatatggtcgatctccgcttccagcgtcgggccgccgtcgaagatatcgacgtagccctgataactcaggccttccgcctccagtaggcggcgcgccggcagggtttgcgggtgcacttcgccaatcactttctgcgcatcttcggccaggaaatcgacatacaacgggtgtttcggcatcagctcggcgataaacgccttttgcccggtgccactcaggtagtccgccttggcgaactcgatggagaagaaacggtgaccgacgctctcccagaacggcgaacggccgttttcatcggagaaaccgcgcatctcggcgatcagacgccgggagaagcgttcacggaacgcggcgataaacaggaaacgcaccttcgacagcagcttgccgttctcgccgtggcgataatccggatcgaggaacaacgtacacagctccgaatggccggtatggtcgttgctgaggaacagcgtcggcaccgatttatagacgttcagctgtttggaggcgtgcacctgcgtgccaacgcggaagctgtaccagggttccgccaggccgacggccacttcaattgcgcagacccccaccgcctgccggcgctcgctgtcttccaacacgaacaaataacactggtcactttgcggaagttcgccttgccaggtttttaacgcccgctcaatgcgcgccgacaaggtatcttcattctgcggcagtgaagtgagaccgatgccggatttaccggcaagcgtcagtaaatccgccagatcgcgacgctctatagggcgaataatcatcataatgcgaacctcttctgaatcaggctgcgccggtgaaggcgcagcccgctgattagctgcaaatgcgcgccacggcgcgcgcgaatcgcgccagcccctctttcacatcctgctcagggatgatcagcgacggcgtgaaacgcaccacgtccggaccggcgatcagcgcgataacgccttcttcgttggccagttgggtgatctgcttcgctttgccggcataatctttcttcaattggcagccgatcagcaaaccgccgccgcggatctcggcgaagatcgggtactgacggttgatatcgttcaacccgtcgatgaaccactggtgacgttgtttgacgccttccagcacttccggcgtgttgatgatggagaacacttcccccgccaccgccgtcgccagcgggttgccgccgtaggtggtgccgtgggtgccgacgcccagcgttttcgccagcgcatcggtggtcagcatcgcgccgatcgggaagccgccgcccagcgctttggcggtggtcagcacgtccggcaccacgccgtactgcatgtaggcatacagatggccggtgcggccgacgccggtctgcacttcgtcgaagatcagcagcgcgttatgacgatcgcacagttcacgcagcccctgcaggaaactggcctccgccggcagcacgccgccctcgccctgaataggctcgacgatcaccgcgcaggtgcgatcgttgataagctcggccgctgcggccagatcgttatacggcgtatgggtgatgccgcccggcagcggcgcaaaatcctgcgaatatttcggctggccgccggcggagacggtgaacagtgtgcggccgtggaacgcgttgttgaacgccacaatctgatctttaccggcgccgtgctggtcgtgcgcgtgtttacgcgccagtttcagcgccgcctcgttggcttctgcacccgaattacagaagaacaccttgtcggcgaacgtggcgtcgatcagttttttggccagacgcagtaccggttcgttggtatagccattgcccagatgccacagtttgcccgcctgttccaccagcgccgccttgaccgccgggtgcgcatggcccagcgcgttaaccgcgatgccgccggcgaaatcgatgtaagacttaccctgctgatcccacacctgcgatccttcgccacgcaccagaataaaatcggcaggggcataaaccgggaccatccagtcatcgaaagactgacgggtaactgcgattggctgttccatagtgacctcataatctcagcaaaggctgaattttgactgtaagggccgctcaagcccggttagaccgccacaatgcaaaaaaaccgttgttcaaaaccgactttcgcggcggagaaaatgctgtcccttaccgctgatttagaaacaaatctgttacataaaatcggtttttcactatttatggcgtatatccggtccctgagcgggaagtaaatgttaacgagcagttaaaatacatgtcgtttgataaagagtgtagagcagctatcgtgccaaaacgggatttttgccggattttgctattttttacgttaaaacaacggcttataatgaatatttattcattttctatgcattggtaatgcataaattaaaaaataaggcctaaaatcatcattgcgtgcgaaatcctattcaattacgaaaaacttcaggatttctgatcgggctcgcaaaaataatttcccccaatttgctcgctatcacactttttgcccccatcgggtgcagcggcgcgccagcatggtgcaacgcggcagcgacgcagaggcgccacccgccatactcgcgaaaaaggagccgcgctgaccgcggttcctgctttgtacgccagcgactacactgtgatcctgaccgccccttctcttctgcgcacaaggagccaccatgcccaagaaaaccgtcgatctcagccagccgcacgcccaacacgacatccgcgcgtttctcgacgcgctgaatgccggtggcggtaaacccatggagcagatgaagcccaaagaggcgcgcagagttttggaagcggcgcagcgcagcgtagacgtgccgctgcgcgaggtggagatcagcgagaaaaccatccacgttgagggccaggatattctgctgcagttggtgcggccggccagggtcaaagagaagctgccggtattcatgttctttcacggcggcggctgggtgctgggcgattttcccactcatgagcggctggtgcgcgatctggtttacagctccggcgcggcggcggtattcgtcaactacccacgctccccggaagcgcattatcctcaggcgatcaatctggcctacgccgccacggaatgggtggccgagtacggcgaaaaaatcaatgtcgatgggtcacggctggcggtggtcggcaacagcgtcggcggcaatatggcggcggtggtcagcctgatggccaaagagaaaggcataccggcgctgcgttgccagatcctgctgtggcccgtcacgcacgcccactttgataccgattcctatcatcagttcgccgaaggccatttcctgacccgcaacatgatgaagtggttttgggacagctatgcgcccgataaggcgcagcgcaaagagatctacgcctcgccgctcaacgccacgccggaacagctgcggggcttgccgccggcgctggtgcagaccgccgagctggacgtgttgcgcgatgagggggaagcttacgcgcgtctgcttgacgccgccggcgtcgaggtcaccgccacccgctacaacggcctgatccacgattacggcctgttgaatccgctcgcccacgtcccggcggtgcattcggcgatccaccaggccgggcgcgcgttgaagcactacctgtcctgacgctagccaaccacgtggcaagccacctgatggccgggcgccacgctgcgcagatgcggcgcctgttcacggcattgcgccgtggccagcggacagcggggatggaaacggcagccgcgcggcgggttggcgggattgggcgcttcgcccccggccacccacgccggcgaacggtgcgcatccagcgtcggcaccgccgccaacaaggcctgcgtgtagggatgcagcggttggcgaaacagcgaatcgcggtcggcgctctcgacgatctgccccagatacatcaccgccacgtcctggcacagatgctccaccacgccgagatcgtgcgaaataaacagcagcgtcaccccctgcctttcctgcaaatcggaaaacagattgatgatctgcgcctgaatcgacacgtcgagcgccgatatcggttcatcggcgacgataaattccggttgcaggatcagcgcgcgcgcgatgccgacgcgctgccgctggccgccggaaaactcatggggaaaccgcccgtaatgctgcggcgacagcccgcagatcgccagggtatcgagcacccgttcgcgcagttccgccttgcttgccaggccatgctgcaacagcgcttcgccgatggcgtcgcccacgcgcagacgcggattcagcgagctgtacggatcctgaaacaccagctgcattttcggccgcagggcgcgcagcgcgtctttgctgaggctatccagcgcctgccctttgaacatcacctcaccggcggttttatcgtgcaggccgagcagcgtgcggccgacggtggttttgccactgccggactcgcccaccagcccgaaaacgcggcccttgcgaatgctgaagctgacgtcgtccaccgccttcagttggccggtggttcgcccgaacagcccgtcgcgcagcgggaaatatttctttaatcctttcacttccaccaggggttcagtcgacatgcaggcgccctccggcgttgaggaagcaggcggattggcgctgcggtgtaccgtacaacggcgggatgccatcgcggcagcgcgcggtggcctgcgcgcagcgctcggcaaacgcacagtgttcaggcagccgcgccagatccggcacctggccgggaatggagtacaaacggcgacgccgctgccccggcaccggccgcgaggcgatcagcccctgagtataagggtgccgcggttcggccagcacttcccgcgtcgttccctgctcgacaacgcgcccggcgtacatcaccgccagccgatccgccatttgtgcgatcaccccaagatcgtgggtgatcaagatcatcgccatattgtgtcgccggctctgctcgcgcagcaacgccaggatttgcgcctgtaccgtgacgtcgagcgccgtggtcggttcatcggcgatcagcagcgccggccggcaccctatcgccatggcgatcatcacgcgctgcagcatgccgccggaaagctggtgcgggtagcagcgcatcagcgcctccgcgcgcgccaaccccacttcctccagcagttgcaccgcctgacgccaggccactttcggcgacagggccagatgacgaatcagcggctccagcagctgttcgccgagcgtcagcaccggattgagcgcgctcatcggctcctgaaagatcatcgccagccggttgccgcgcaaatcggccatctgcgccgcccgcagcgacagcaggttttgtccttcaaaacgaatctcgccgccgtctacctgcgccagcggctgcggcaacagccccatcagcgccatggcggtcacgcttttgccgcagcccgattcgccgacgatccccagcgtttgcccggcctgcagttccaagctgacctgctgcaccgcccgcaccggcccctgctcgccctgaaacgacaccgacagtcggtcgaacgccaccagcggttgactcatcgtgttactccattcattttcggatcgagcgcgtcccgcaggccgtcgcccaggatattgatcgccaccacggtgacgaagatcgccagcccgggcggcatccacagccagggccggcgctgaaagtcgatcaggctgttggcggcgtccatcatgttgccccacgacggcgtcggcgggaccacgcccagcccgaggtaactcagcgccgattcgctgagaatggcgttggccaccgccatggtggccaccaccaccagaatcggtacggtgttgggcagcagatggccgaagaggcgtcgccgggtggagagacccagcacctcggtggccagcatgaaatcccgctcgcgcagcgacaggatctggccgcgcaccagccgcgccaatgacggccagcccagcaggctcagcatgatcatcaccatgtagatgcggtagtccggcgacacgtcgagttcggtcagcatcgcgcccatgatgatcaacagcggcaggccgggaatggtcatcagcagatcggcgaagcgcatgatcagccggtccgccacgccgcccagataaccggaaagcgcccccagcacgtagcccagcgtcaccgacagcaacatcgacaccaggccgatggtcagcgatatccgccccgccagcagcagccgggtgcagatatcgcggccgagaaagtcggtgcccaaccagtgcgcgccgctcggcgcctgattgatattcagcacatcgccggcatcgtcgcgccacggcgacaacgacggcccaatcaggcacagcaacgccaacagcaccagcaacgccagcgaaatcatcgccggccggtggcgacgcagccgtcgccaggcctgcgccgcgggcggtggcgacagttgcgccagcgccggcagttgcgcctggcgccagcggcgacggcggccgaaaaacaacgtagccaacatcgtgttacctcaagcgaatgcgtggatcggcgtaggcgtacagaatgtccgccagcagattgccgagaatggtcaaggcggccagaaacagcgtgaaccccatcaataccgggtaatcacgcgccgccagcgaatcgatatggatgtgtccggcgcccggccagttgaagattttttcggtgatcagtgcgccggagaacaatcccggcagctcgaaccccagcagggtgatgatcggcaatagcgcattgcgcagcgcgtgtttgaggatcaccgttttctccctgagccctttggcgcgcgcggtgcgaatatagtccatgcggatcacctccagcatgctggcgcggaaatagcgcgtcaggctgccggcctgcagcatcaccagcgccagcaccggcaacagcaggtgcgccgccacctccagcgcccaggccagcccgctcgcctcgctgccggtgcgcagcatgccgcccgccggcagccagtgcagatcgacggcgaaccatttgatcagcaacaggcacaggaagaacgtcggaaacgacatggcggcgaacaccgccacggtgatcagatgatcgaacagcgaatagggtttcatcgccgagatcactcccaccgccagcgcgatgccccaatacaacaccatcgccaccgccgccagcaggaacgaattccagatgtattggttcagcagcgtgctgaccgggatctggtactgcagtgaaaagccgaggtcgccctgcagcagccggccaagccagtgcagatagcggctgaacaacggctgatccagcccgtacagcgcccgcagctcggcggcgcgttgcgcggtcagattgatgttgccgtcgataaaatcgccgggcgccagggcgaaaatgcaaaaaatcagcaaggaagccaacagcagcatcgggatcgtctgcagcagacggcgcaggataaaatttctcatcgcgggttccatcgccgccgcccggaatggcgcggcggcgtcagggcgttacggcgccggtttgacgttcggcaggctgccgaccaatccgttgtagatatccggtttaaagccggtgacgcgcgcgctgctggcgctcaaaatctcgcggttgccgagcaggatcaccggcggatcgtcggacagcgcctgatacagctggtggtacagcggcttgcgctgtgcgatatccagcgtggcgttggccctggcgatcagcgcatccacctgcgggttgtggtagccggtctcgctctcgcggctgatgaaatcgcgcacgccgtcgtgcggatcgttcagcgtgctggtgctgagggacgccaggtcgtaattgcccgccttgcgctgcgccagcagcgcgttgaaatccaatacctgcggtttcagcaccacgccgagccggcggtagttatccttggcgatcggcaccagcgcgtcgttgatcagctttttggtcaccagcagcgtcagctccagctttttaccgtctttctgccggatgccgtcagcgcccacctgccagcccgcctcgtccaacagctttttggccttatcgagatcgtaagcgtaaggattgatgccattcgcgtcataggcccaggagataggcgaaatcggctggttggcgaccttgccgtacccctggtacaccacggcgatcagcttttgccgatccaggccgtaaatcatcgcctggcgcacccgcttgtcctgcagcgccgggcgcttgaggttgaagtcgatgcggctgtaatcgctcgagctgtaaaggttgatattggcgaagccgagcagcttgagctgttcgatatcgtccggcttggcggtaaaggcgtcgtagtcggtctcaccggtctggaatagctggaagttggtggccgggttggtgacgcgatagataaagcgcgccatcggcggcgtaccgaggtagaagttcgggttggcgtggaagcggatctcctgccccggcacgtacttgtcgtaaatataggggccgttgccgagcggtttgccgttcaaggcgcgcacgccgtcgagcttgccccgctgatagtctttgccgtagtaagcccgcgacagcaccgggccgccgatcagttgcagtgtggtagcgcccggttgcgtggtgacgatctgaatggtgcgatcgtcgatcaccttcaggccgctgatgccggcggcggtgccgtttttatactcggcgccgccctgaatgtgcgccggcgtgatgtcagtgtcgccgtcataggccggatcgtgcaacagcgtcagggtaaaggcgatatcgtcggccttcagcggcgagccgtcgctgtagaccagattcggccgcagcttgatggtgtaggtcagattatcgggactgacctgccaggactccgccaggcgtccttccggcttgccctggctgtccaggccgatcaggcggctgaagatcacgtcggtgacgttctcgtcccagccgttggtgaacagatacgggttgaaaatcccctgcggttccgagatgcccgccaccacggtgtctttgcgcagcttggcggcggccggcacccggctgacgtcgctggccggcgtgatgccttcggccagcgtttccgcctgcgcgccggcgctcaatcccagcgcgcagatcaacgccagcggcgtcaaccgataacgcaacagtttgtttagcttgttttttattctactcacccactgcccctcgtctacccgttgataaaaatgtgacaaaatttatcgcagagtaatgggcggctggagggctgtctaacaacgaaaccggcattccattgccgaaaaaagcattatgaatttttcttgggcgaagcggcgtgaaaaacgcggctcaaccggccgccgccagcccccggataagtttggctaaggttttgatcgcctcttcaaagcggtcattccattcaaaagaggcgttgagacggaagcagtggttgaaatggtcgccggtggtgaacatgcgccccggcgcgatgctgataccccgggaaagggcccgccggtacaactccatcgacgacagcgccggatccagctccagccacaggaagtaaccgccgtcgggctggctgacctttaccgtcggcgggaaatggtgggcaatcgcctgacgcatcgcgctttggcgctgggccagcaggcggcgcaaccgccgcaggtgggtgtcgtagccgccgtgcagcagataatccgccagcgccatctgggtcggcacgctggtggaaacggtgctcatcagttgcaaacgctggatctgctgcgcataacgccccgccgccacccagccaacgcgaaagcccggcgccaggcatttggaaaacgacgagcagtgcaggatctggccgccgctgtcgagcgccttggccggcagcggccgttcggcgctgaagtacagctcgccgtagacatcgtcttcgatcagcgagatctgccgctcgcgcagcagcgccaccagacgctgtttgttggcctccggcagggtggcgccctgcgggttctggaagtgggtcatcagccagcaggctttgatcggatactgctccaccgcctgctgcaacgcgtccagatcgatgccgtcctgcggatgggtggcgatcgccaccgccttcagccgcagccgttccagcgcctgcagcgcgccgtaaaacgccggcgactcgatcgccacatagtcgcccggttgggtcaccgcctgcaggctgaggctgagcgactccatcgccccggcggtgataacgatttcgtccggcgcgacctgcatgccgctcagcgcataacgttgggcaatgtgccgccgcagcgcgtcgttgcccggcggcaggttagccagcgaactgtgcggcgtgaatttgcgcgctacgctgctcagcgcccgcgccagcttcggctgggcgaacagcgtggcgtcgggaaaggccgaaccgaaaggcacgatgtccggatccttgcaggcctgcagcacgtcaaaaataaaggcgttgatgtccacctgctcgctcagcaacagtttctcgccgcgcgaaggctgaggcagcggctgcggacgcgccgccacgtagtaacccgactgcggccgggcgacgatccacccctggctctccaacagttggtaagactgcaccaccgtcatcaggcttaatccggcgcgtttgccgctctcgcgcagcgaaggcagcttgtcgcccgcccgccacacccggttctggatctgttctctaatctgttgcgcaagctgctcgtatcgggtcataaccattaactgttatatgaaaaagtaaaataactgtcactattatagtcactgtacttcgtgattaacttcacgccaagcttttcacataaaaatgacagctatactcaagaggttaatttatgttcaaccctaggaggcgccatgctgggtcttgatgcactggaactcgccagaatacagttcgccttcaccgtgtctttccatatcatcttccccgccatcaccatcggcttagccagctatctggcggtgctggagggattatggttgaaaacgcacaatgaagcctatcgtgagctttaccatttctggtcaaagattttcgccgttaacttcggcatgggcgtggtttccgggttggtgatggcctaccagttcggcaccaactggagctttttctccgagttcgccggcagcattaccgggccgctgctgacttatgaagtgctgaccgccttcttcctcgaagccggtttcctcggcgtgatgctgttcggctggaaccgcgtcggcccagggctgcacttcttcgccacctgcatggtggcgctcggcacgctgatctccaccttctggatcctggcctccaacagctggatgcagaccccgcagggacacgaaatcatcaacggccaggtggtgccggtcgactggctgaaggtgatcttcaacccgtccttcccgtatcgcctgctgcacatgtccaccgcagccttcctctcctcggcgttcttcgtcggcgcttccgccgcctggcacctgctgcgcggccgcgatacgccggcgatgcgcaagatgctgtcgatggcgatgtggatggcgctgatcgtcgcgccggtgcaggcgctgatcggcgatgcgcacggcctgaatacgctgaaacaccagccggcgaagatcgccgccatcgaaggccactgggaaaacccgccgggcgaagccacgccgctgatcctggtcggttggccggacatgcagcgtgaagagacccgcttcaagctggaggtgccctatctcggcagcctgatcctaacgcacagcctgaccgagcaggtgccggcgctcaaatccttcccgccggaggatcgccccaactccaccgtggtgttctggtcgttccgcatcatggtcgggctgggcatgctgatgatcctggccggggtgtggagcctgtggctgcgctggcgcggcgggctctatcagtcgcgtccgttcctgtacttcattctgtggatgggcccatccggactgctggcgctgctggcgggctggttcaccaccgagatcggccgccagccgtgggtggtgtatggcctgctgcgcaccaaggatgcggtctccgcgcacggcgatctgcacatgagcatcagcctgctggcgtttatcatcgtctattgctcggtattcggcgtgggctactcctacatgatgcgcctgatccgcaaagggccgcagccgcatgagcaccaagaagacaataccgagggccgcccggcgcgtccgctgtccgcggtcaacgacactctggacgacaggagctgaacatgggtatcgatcttccgctgatttggtttgtgatcatcgtgttcagcaccatgatgtatgtggtgatggacggtttcgatttgggcatcggcatcctgtttccgtgggtgaaagagagcggcgatcgcgatctgatgatgaacaccgtcgccccagtgtgggacggcaatgagacctggctggtgctgggcggtgcggcgctgttcggcgccttcccgctggcctactcggtgatcctcgacgcgctggcgatcccgctgacgctgatgctgatcgggctgattttccgcggcgtggccttcgagtttcgcttcaaggcgacgccgcagaagcgccatatctgggacaaggcgttcatctggggctctctcttcgccaccttcagccagggggtagtggtgggcgccgtgatcaacggtttcccggtcgaaggccgcacctacgccggcggcgcgctggactggctgacgccgttcgcgctgttctgcgggctggggctggtggtaacctacgccctgctcggttgcacctggttggtgatgaaaaccgccggcgatctgcaggcgcgcatgtattacctggcgacgccgctgctggcgatcctgttgctggtgctggccgcagtcagtatctggacgccgatcgcgcatccggaaatcgccgcccgctggtttacgctgccgaacctgttctggctgctgccggtgccgctgctggtgctgctcagcgcctggggcattcagcgcggggtgaaacgcggcgcgcactactcgccattcatgctgacgctgttgctggtgttcctcggcctgagcgggcttggcatcagcatctggccgcacctgatcccgccggccatcagcctgtgggacgccgccgcgccgccgcagagcctcggctttatgctggtgggcgcgctgttcatcatcccgatcatcctggtctacaccttctggagctactacgtgttccgcggcaagatcagccatgagcacggctatcactgaggagggaggacgctatgcaagataaaacggcagccgtcgctccggcgccctggtggaaacgcatcggttggctggtgatcatctggagcgccagcgtgctggggctgttcgtggtcgcctcgctgttccgcctgctgatgaccgcggcgggcatgaagtcgcattaacgcggcgccttatctggacgcgctgttgggaaagtaaaaagagaccaccagcgtgaccagcggcaaggcgccgatcttcaccagctcgaacacttgaccgagcgcttcgtttttgtcccaatacgcgtgggcggcgaatacgcccacgctgaccgcaaatatcccgcacagtacctggcgcgccaggcgcagccgctccatttcgtcgaagaccaacacctgctccagataaacctggctggcttcatcgcgcagattacggctttcgatgctcatgggaagatctccacgacccgtcccaccgcttcaagctgttcgccattctctcgtacgatgcctagacacgtaccatcctgcttcatccagtacttatcggcaatggcgatcagtgcaaacgccattttgattacctcggttttttccatcccgtgacgccgggcgatatcgttcagatcatcatcaattttgttcgataaccgaataggtaaactccgcatactccacctcctgtggtcgttgattcaccgggggaaagtctactggaagggtaaatgtcgttcaattagtgaactgcgtaacgcctcgcataacccgcatgcaacgctagtgcggcttgcgccccatcgcgctgaggaaacgctgctgcaggcgcaacagctcctccaactccagcaggcggtagtcgatgccgaaacgcggcgccacctcgccgataatgcggctcagcgccgggtaatggcggtggctccagtgcgggaacagatgatgcgtcaaatgcaggttcgccccgccgagccagtaccccagccagcgcggccgggtcagccagtcgaaggtagtggcgaacacatgatgataccagccgtgcggcattgcgccttgttctggcgcctggtagaagttggccttggcccagtgggtgccgatgatgagcatcacgaacagcagtgaagaaagcatctggctcagcaaatagaccagcaggatttgcccgatgccgatagccggcggcagcagccagcacgggatcgccagcgccagcagcaggtgcgccgccttccccgccagaaacccgatccagccacgcacgccctgctgcgccatgcgcgccgccacgcgggtgcggcccgccctgtccagccaatcgaacagccagatgtagtacggaaaagtcagcgccgccaccagcggccaatagtaacgctgcgcgcgcataaagggccgccagcgctggaacggcgtttgccgcagcacgccgttggcgtcgatgtcgggatcgtaatgttcgatattgttatgggcatgatggaacagcacgtgccgcacgcgccagcagtcgggatccaaccccagcggcacgctcaccagggcgttcaacccgcggttggcccaggggcgacggaaaaatgcgttgtgcgaggcgtcgtgcaccacgttcaccgtcaggaacatgccgataaagataaaaccgaaataacaggcgaaaaacgcccagccgttctgctgttgcaggctcagcccgtaacacaggccgcacagcgccagcagcagcgcgaccttcgccagcatgccgccgtcggcgaaacggtgatcgccgttggccgccagataatgctgggcggcctgcatcagcgcgcggtgcaacccgctgtcgtcgcgccgataggctaacggacgcagcggtttcacggctgccccataaggcgtaagaagcgctgttgttgcgccagcagttcgcgatagccgatgcagcgatacgccatgccgtgccgctgcgccacctctgccaccgccgcggccagcgccgggtaatggcgatgattccagccgggaaacaggtgatgggtcaggtgatagttcagcccgccggtcagatgctccagccagcgcggttcgggctgccagtcgcaggcggtggcgaaattgtgccgataccagccttgcggcatgctgtcgcccgtcggcgccgggtaaaactcggcctgcgcccaatgggtgcccagcagcaagaacaccaccagcagcgaggcgcacatctggctgagcgcgtaggccagcagcacccagccccagccgatgccgtgcaagtggcccacgaccagcggcgccaccagcaccagcgccagatgcgcgagcttgcacagcacgaacagcgtccaaccgccgcgtcccgccagcacgcgtttttcccgcagcggcgttttatcgagccgatcggaccaatcgaaaatccacgcgatgtaaggcaaggagagcgcggcgatcagcggccagtacagatgctgataacgcatatgcggtcgccagcgctggaacggtgtctggcggaaaaaaccgttctcttcggtatccagatcgtagtgttcgacgttggcgtaaacgtggtggtaatccacatgccgcgtgcgccagtagtccggatcgacgcccagcggcagcgtcaccaaccgccccaccagccgattggcccaggacgcacgcaggaaagcgttatgcgaagcatcgtggttgacgttgacgttaagcagcatgcccatggtcacgaacaggaaatagcagaggaaaaacgcccagggctgatgctgcagcaggctcaatgcgtaaaacccgacgcacaacgccagcaacagcgcggccttggccaaccgcgcggcatcggcatagcgatgatcgcccgccagacaggcgtgggccgcgcgcttaagatcgcggtggaaggcctgttcgccatcggcgggaaaacgcagcggcggcaatgattcagccatgcggttcctccacggcggccggtgcggccacccgtccccagcccagcgcgacgcacagggcatgcaacgccacggcggccatggcgatatgccaatagcgctgcggccaaccgagatagccgataaacagcagcggcatgcccagcgcgaccagcaaccagacggcgctcgcccaaggtcgcccttccgtcatgccgcccagcgccaccgagcccaacgccagcaacaccagcagcgccatttgcggccagttgatgtcgccgtagccgtaaccgtattggtagacgtaaccgaccaccagcgagaacaacagcatggcgccgctgaatacgctgagcgccgaacggcggtcgcgtggccggcccggcgccgggcgccaggccagacggaaatagcgcaggaacggcagattgctcgcccagaacgggttggcggacggcctgtcgccgccgacgccatagctgaacggcgtgctcggcaatgccgggcagaaggtgccgaacagcttgtcccagaagataaagctgccgccgaagttcttattggaataggccatatccttgacgtgatgcacccggtgatgcgccggcgtgaccaggattttttccagcacgccaagcttcggcgtcagcgcgttgtgattaaacagctggatgctgtagtgaaaaatagagaccgcaacaaacaccgacagcggcacgcccgccagcgccagcagcaaaaagaacgggatcgacgtcaacgacgaataccaggagttgcgcacccccagcgacagattgaaatgctcgccctgatggtgcaccacgtgcaccgcccacagcaggcggaaacgatggtgcagacggtgcagccagtagaaaccgaagtcccacgccagcagggcgaacagccacatcaacagcggcggccaggcgtccagcagccccaggctgaaatgcgcggccacgtagccgtagcaggtgatctccaacccgcggaacagccacagcatgatatggccggagttcaggttgaacaccagatcgtgccagttgaccggctcgcgacgcccccactgcagcgccaccgcctcggccaccacgatgaacagcatgaacactatcggcaatgccagatcgctcatcccatttctcctttaaccacgcgccggcgcagggtgttcatacgcagggccagccagccggcgaacagcgccagcagcgcgccgccggccaaatcgacaaacaaatggcggcgcagttgcagaatcgagaacgcgatcgccgcgccccacagcatccacagcgccgtgcgcactttgcgctcgccgtcgctcagcgcccacaccgccagcaccgtcagcgccatatgcaacgaaggcaggcagttctgcggcgaatccacctgggttaacgccgccagcagctgcgcgctgatcccgacgccatcgttctgcggataggccatggtggtcggccacagcaggtaaaccgccccggcgcccagcgcggtgagctgcatcgcccgcgtcagccatgtgatccgcggcagcggcgccagcagatagcccgccgggacaatgaggaagaacgacaggtagagccatatggccgtggggctgaacgggatcgcccggtcaagcgccgacggcggcaacagggttcccgccccctgcaggcgatcggtcagactatacaccaccccgaccgtcccccagccgagcaacatgtgccctagtctgaacagcgtatttttcatgctacctccgcctggcgcacgatgcgccgccgcttgcgatcgaactgcggcagcaccgcctgcgccgtcaaccgccattcgaggcgctcggtggcgatgccctggcgagcgaacagcgcgatcagctgcgcctgacagtgcgccaacgccgccgggctgcaatcggcaatcaattccaaccgccgttcgccgcgctggatcaggcggtaatcgctgctcagcggcaacgcattggcgatcgttcggctgcaggcatcggcgaacaccgcctgcggttgccgctgcgcatcgggcagcatcagttgatcgtcgcgccgcccctcgatacgggcgatcgcccgcgtcggctgcccgcacgggcagggttccttgcgcagcaccaacacatcatccagccgataacgcacgatcggctgcgtgctgcgggtaaagtcggtgatcaacggcgtaaaacgcagttcgtcgatccactgaggttcgatatgcaaaaactcttcgttcagatgcagcgtaccgtgcgcgcaggtcgcggcaagaaatccttcggtggcctgatacacttcgccgaccgccggaaatacctgcagcagcaggcggcggtcctgctcttcaagcacctcggccaccgagatcgcttttttgaccggcaatttcacctgcccggccagcaccgccagcgccaaggcgcgcagcacctgcgccggggccacgataatgctgggcgcctgccgttccaatgcgggcaaatgctcgctgaacggcgccagcagatcgtaaaacgccaggctcagccaacgattgttcacgctgtgatagagattattatccgcgcgcagaaacagcgcaacgcgctcgcccgccgacagcccgtccggcagcattttcgccagcatgccgccggcccacacctgctgttcgcgcgggctgacgacaaacacgccgcgctgcccggaagtgccggacgacaatccaacgctgtagcgcccgatcttcggcgtgaaatcgcgatccgcctcgctgcgctgcgcgcaggccagcaccgcatcgcgctgcagcccggcggtgttcatccggtcgaactgcgccatcatcagcgccttgtccatctgcggccattcggcgaacggccggcggctgaagccttgaaaataggggctcttgctcagcacccgacgggcaaagcccgcgagctgccgggcctgatgcgcctccagcgccgcacgatcgtcaaagcgcaggcgccgggcgcggaaatagtgccaaagggtcatgaacgggatcacaggtccccctcgtggcacagcaaaatgttgacctggccgcccgcccacagctggttgagccgctccagcgtgcgggtgtacgccaccgcgtcgtccatcaccagattggccaagcgcgaaggcccgcgcagcgtctggtaactcttcggcgaccaggcggcgtcgctggccagcagcgtccagccggcgtcggtgagaataaaggcgccgatatggccggccgcatgccccggcagcggcaccagcacgatctgcccttcgctgcccggcagcgcatagccgcgctcgaacggcgccagcagcgcaggcaacgccaccgagggaaaagcttccataaactgcaggttgctctcgaaatctgccgggatcagaccgggaataaaggcgcgcttcagcgccgcgaaaccgcgcagcccgcgggtttgctgccagccttcgccggagcaaataaagtcgagttggctgaaatcctgcagcccggcgatgtgatcggcgtgaaaatgcgagacgatcagcgcctgaatatccccctcggcgtaaccggcggcgcgcagctgatgcgccaacgactcggcgggatcgaaatagaccggcgtcatgcggcgataaaggctgaacacccccgactgcgtgtgctgctgaaaataatgcgcgtagccggtatcccacagccagcggcgctcccccacctccagcagataggcgcgcgccgggaatttgcatacccggaacccggcgccgcgcagcgccatgcagccgatatgcgtgcaatagcccacttcaaacacggtgaccttagccatgctgtccgcctccttgccgccgcaaccactcgccggtcaggcgaatgccctcttccatcgaataacgcggctgatagcccagctcttcgatcgcacgggtctggctcagcgtcatgtcaaaatgcaccgccgccacgctgtagcgcgtcagcagcggttccttgccgctcagcgtcgcccacagctccatgccgccggccagcgtatgcagcaacggatagggcacggcctgcagccggtagcgcagccccagttcctgacgcagcagcgcatccagcatctcccgccagccgctgcggctggtgattggtaatgttgtaaacggtgccggacggcaacccgcgctgccggctggccaggtccatcgcgtgcaccacgttgggggcgaaggtcaggtccagcagcgcttgcccgccgccgggcagccgcagcacgccgcgatcgcgttcgagctgctgcaacagccgcggcacgatcacccgatcgtgcgggccaaacaggccgcgcggccgcagcataatgtaggtggtttgcgggtagatcttcgcctgcgccaacaggcgttgttcagccgcatacttgctggcggcatagtgattggcgaagcgccgggcgcggtaaccttcgtcaagatcgtaatgcggctgaaaatcgaagtagattgccggcgtggagatatgcacaaagcgccgcacgccgcagcgccccgccgcctccgccagcctctccgtcgccgcggcgttgatgcggtgaaactccgctttgccgccccagggtgaagacttggccgcacagtgccacacccactcgcagtcggtgacgagctgccggcactgctgcggcgtggcctgcgccagatcgagcgcacaaaactcggcgcccagccgacacaacgctgcgccggcccgctcgtcgcggccggtggcgcgcacctgatgtccggcctccagcagccactgcgccgcgttgcgtcccagcccgctggtcgccccggtgaccagcaccctcatggcagcaacaccatgccggccagcgccagcccggcggcggtgccgatcagcatcaccggctggccggggttgaagcgcccggtggtcacggcggcatgcagcgccgtcgggatggacgccgccacctgattgccatgatagcggtagatatccaccagcgcctcgctggagacgtgcagccgtttgcgcatatgttcgagcgacagatgactggcctgatgcggcaccacggtgacgatctgcgccagggtcaggccgctggcgctcagcagccggtcgaggtaatcctcaatcagcgccgacgcctggcggaacagaggcttgccctgcatatgaaacaggaagtcttgctcgcacatgccggcgcgcgggttgcgacgcgtgccgccggcgcggatctcgcacagttcgctgccggcggggtaggtttccaccaggctggcgaggatgccgctggcgccgtcgccgcgctccacgatggcgcaggccgcgccgtcgccgaagatcagcgacgactcttcgtgctgccagtcgatgccgcgtgaagcgagatccgccgagacgatggcgatgcgtcgatacgtcccggcgttcagcagccccgcagccacctgcagcgcagagataaagctgacgcagctgctgttgatgtcgaagcccggcgtgcccggcgccagtcccgccaccttgagaatatgcgcggcggtgcacggcagcgcctgcaccgaaatcgccgaggcggagatcagcagatcgatcgagtctgccggaatggcgcggcgagccagcgcatcttgcagcgcggcggcggcgagttcggcctggctggcatcgtcggcggcgtgatagcggtaaacgatgcccgagcgtttttcaacgtagccggccggtttccccagccgagcgtcgagcgcagaggacgccacgcggttaggcggcaacgcggccccggtggcgatgattttcagaggcagcagctcgggtgagcgaaattgtgtggtcattattgttattgattaacctgactatccataaagcgattctcccgcacgacgcgaaggccacgcggatcatccccggtttttatatcccaaaatgcctttcatcaaggcggtatctcttgttatcggctaccacgggccgacgtccgtcggcgcaagcataagcgtaacatgactgagatattcagtttacgacaaggcggggagaatgggcagacggcgggcgaattatcggaatagcgccgccgctggcgatcagcggcggcggcggggtcagactcagcggcggttgcgcaccagctggtaacggcgtgtcaggtactctaccggcgcactccagatatgcaccaggcggcagaacgggaacagcacgaacagcgtcatgcccagcaccatgtgcagcttgaagatcagcgccacgccttccaggtgcgcagaagcgccggcgtggaaggtcaccaccgcctgcgcccaggccaccagcttcatcatttcgctgccgtccatatgctgggcggagaacggaatggtcagcaggccgagacacacctgcaccaccagcaacgtcaggatcaggatgtcggcgaagctgctggtggcgcgcacccgcgggttggccaaccggcgtttgagcaacagcgcgccgccgatcagcgtcatcaggccgcaggcgccgccggcgatcatcgccagcttctgcttcacgtcgatcggcagaaaggcctcatacatccagtgcggcgtcagcatgccgaggaaatggcccgcgaagatgccgataatgccgatgtggaacaggttggacgccagccgcatgccttttttatccagcatctggctggagccggcgcgccagctgtattgcccgtagtcgtagcgcagccagctgccgatcaggaacaccgcgccggccagataagggtagatgtcgaagaagaactgattcaaaaattgcatgattagcgtcctttggttccggttaacgcatccgtcaggtccagatactgtggcgccaccgcgccggcgaagcgccgctggtgcaccgtctgctgggcggaggcgcagccctgctcgccgagaaatttgacctgctcctcttcccataccgcatccagcgcctgcggcgtatcgtcgcgcgcctcttgcgccacctgcgtcttcagcgcctgcgcctgcgcatcgctgccggacagcgccaacagcagatcgaacagcaccgcatacgggctttcgcgctgctgcaagcgcgcgcccaacagcgccaggatcggcgcaatgtcctgcagcccttcccgcgcctgcgccgcgctgcggctggccagatactccagatacagtggcaggaaatccggcagctcgcggctgtcgatctccagcccggcggcgcggtactgcgccatcaggtcaaccatcgcctggccgcgatcgcgcgattcgccgtgcacgtgttcaaacagcagcagcgaagtggcgcggccgcgatcgaacagttcgcaataatcggcctgcgcgtccagcaacgggcgtgcacacaggcggcggataaacagaatcagctgcgcgctgtggcgcagatccagctcgctggccggctccaatgcttcgatcagcgcctgctgatggtcaaacagcgcctgctccgggtaatccagcaggcgggcgatcactttcaggctgatcatgaggcgtcctccggccgcgcggttttcgcggtcacgtcgatggcgtcaatgcggcggctgttgaacaggttgaacttgccgtcgctgccatggcaaccgtcgccgaagctgaagccgcagcctttgctttccgggaaggcttcacgcgccagctcgcggtggctcgacggcaccacgaagcgatcttcatagttggcgatcgccaggtagcgatacatttcctgcgcctgcgcttcgcttaacccaacctgctccagcgcgctggtgtcgaccacgccgtcgacggtttccgcccgtttgtaatggcgcatcgccagcatgcgcttcagcgccaacagcacaggttcggtatcgccggcggtcagcaggttcgccagatactgcaccgggatgcgcaggctctcgacgtccggcaatacgccgctgtgcgccagttcgccggcgtcggcggcggactgaatcggcgacaatggcggcacgtaccacaccatcggcagcgtgcggtattccggatgcagcggcagcgccagcttccagtccatcgccattttgtacaccggcgactgctgagcggcttcaatgacgccctgcggcacgccgtccgccagcgcctgggcaatcaccttcggatcatgcggatcgaggaagatatcgagctggctctggtacagatccttgtcgctctccaccgccgccgcctgctcgatgcgatcggcgtcgtacagcagcacgccgaggtagcgaatgcggccgacgcaggtttccgaacagaccgtcggctgcccggcttcgatgcgcgggtagcagaagatgcacttctcggacttgccgctcttccagttgaagtagattttcttgtacgggcagccggtcaggcacatgcgccagccgcggcacttgtcctggtcgatcagcacgatgccgtcttcgccgcgcttgtagatcgccccgctcgggcaggtggcgacgcaggccgggttgaggcagtgctcgcacaggcgcggcaggtacatcatgaaggtgttttcgaactggccgtacatcgccttctgcaggttgtcgaagtttttgtcctgcgaacgtttttcaaattccccgccgaggatctcttcccagttcgggccgctttcgatcttgttcatgcgctggccggtgatcagcgagcgcgggcgcgccaccggctggtgcttgccctgtttggcggtgtgcagatgctggtagtcgtaatcgaacggctcgtagtagtcgtccagcgccggcacatccgggttggcgaagattttcgccagcacgccgacgcggctgcccatgcgcggctccagcttgccgttgattttacggatccagccgcccttccatttttcctgatcttcccaggcgtgcggatagccaacgccgggtttgctttccacgttgttgaaccaggcgtattccatgccttcgcggctggtccagacgttcttgcaggtgaccgaacaggtgtggcaaccgatgcacttgtccagattcagcaccatgccgacttgcgaacgaattttcatttgtggttctcctgctgactgccctgcgcgtagtcgttgccttcgtcgtccaaccaatcaatgcggttcatcttgcgcaccaccacgaactcgtcgcggttggaaccgacggtgccgtagtagttgaagccgtaggccagctgcgcatagccgccgatcatgtgggtcggcttcggacaggcgcgggtcaccgagttgtggatgccgccgcgttggctggtgatctccgagcccggcagattcacgatgcgctcctgcgcgtggtacatcatggtcatgccggccgggatacgctggctgaccaccgcgcgcgccgtcagcgcgccgttggcgttgaaggcctcgatccagtcgttgtccgcgatgcccagatctttggcgtcgtcttcgctcagccagacgatcggcccgccgcgcgacagcgtcagcatcagcaggttgtcgctgtaggtggagtggataccccacttctggtgcggcgtcaggaagttcagcgccttctccttgttgccgttcggcttgctgttgagcagcggctgggcggcgcgggtgtcgatcggcggcctgtacgccagcaggctttcgccgaaggcgcgcatccactcgtggtcctgatacagctgctggcggccgctgagggtgcgccacgggatcagctcgtgcacgttggtgtagcaggcgttataggagacgtgttcgtcttccaggccggaccaggttgggctggagatgattttgcgcggctgcgcctgaatgtcgcggaagcgaattttctcgtcttccttgttcagcgccagatgtcggtgatcgcggccggtgacgttgctcagggcttcccaggctttcaccgccacctggccgttggtttccggcgccagcgacaggatcacttccgccgcgtctatcgcgctctcgatcttcggccgccccgccgccgggccgtcggccttgacgtagttcagctgcttgaggaaatcgacctcggtctgggtgttccagctgatgcccttgccgccgttgcccagtttgtccatcaacggccccagggaggtaaaacgctcgtaggtggccggataatcgcgctccaccgcgatgatgtgcggcgcggttttgccggggatcagttcgcactcgcctttcttccagtcctgcacgccgtaaggctgcgccagctcggcggcggagtcgtgctgaataggcaaggtcaccacgtcggtttcctggcccagatggccgacgcacacctcggagaaggctttggcgatgcccttgtagatttcccagtcgctcttcgaatcccaggccggatcgaccgccgccgacagcggatgaatgaacgggtgcatgtcggaggtgttcatgtcgtctttttcgtaccaggtggcggtcggcagcaccacgtcggaatacaggcaggtgctcgacatgcggaaatcgagcgtcaccaccagatccagcttgccttcgccgccctgctcgcgccattccacttcctgcggcttcacgccgccctgctggccgagatctttcccctggatgccgttctcggtgcccaacaggtatttgagcatgtattcatgacccttgccggaagagcccagcaggttggagcgccagacgaacaggttgcgcgggaagttctgcggattgtccggctgctcggcggcaaagcccagcgcgccgctcttcaggctgtcgacggtgaactcgaccggcgattggccggcggcgcgggcctgctccgccaggcgcaacgggttagcgcccagctgcggcgccgacggcagccagcccatgcgctcggcgcgcacgttgaagtcgatcaggctgccgccgaagcgcgatttgtccgccagcggcgacagcagctcatcggcgccgacggtttcatagcgccattggctggaatggttgtagaagaacgaggtgctgttcatgtggcgcggcgggcgttgccagtcgaggccgaacgccagcggcagccagccggtttgcggccgcagtttttcctggccgacgtagtgcgcccagccgccgccgctctggccgacgcaaccgcagaagatcagcatattgatcaggccgcggtaggtcatgtccatgtgataccagtggttgacgccggcgccgacgatgatcatcgaacggccgtgggtcttctcggcgttttgcgcgaattcgcgggcaatgcggatgatgttatggcgcgacacgccggtgatctgctcggcccaggccgggctgtaagccttgacctcgtcatagtcggcagcgcagttggcgtcgcccaacccgcgctccaggccgtagttagccagcgtcagatcgtacacgctggtcaccagcgcttcgctgccgtccgccaactgcaggcgtttcaccggcagtttgtgcagcaggatctcgtccagcgccacgctgttgaaatgctcgctgtcggcgccgccgaagtacgggaaacccacctcggcaacgtcgtcatgcatgcccaacaggctgagttgcagctcgacttcctgttgcgacttgccttcgcgctgctccaggttccacttgcccttctcgccccagcggaagccgatggagccctgcggcgccaccagctctccgctgcggctgtcgatagcgacggttttccattcggggttgttttcctggcccaacccgtccaccagatcggcggcgcgcaacaggcggccggcggcgtagtggccgccttcacgcggctcgagcagcaccagcatcggcatgtcggtatagcgacgcacatagtcgcggaagtagccaacttcgcgatcgagatggaactctttcagcatcacgtggcccatcgccagcgccatcgcgctgtcggtgccctgcttcggattcagccagtggtcgcacagcttggcgacttcggcatagtccggcgtcaccgccacggttttggtgcccttgtagcgcacttcggtaaagaagtgggcgtccggggtgcgcgtttgcggcacgttggagccccaggcgataatgtaagaagagttataccagtcggcggactccggcacgtcggtctgctcgccccaggtcatcggcgaagccggcggcaaatcgcaataccagtcgtagaagctcaggcaggcgccgccgatcagcgacaggtagcgggcgccggcggcgtaggacaccatcgacatcgccgggatcggcgagaagccgataatgcggtccgggccgaaggttttggcggtgtagacgttggcggcggcgatcagttcattgacctcctgccagctggagcggacgaaaccgccgcggccgcgcgccaccttgtagctcttggctttttccgcatcgccgacgatagagccccaggcttcgaccggatcgctgtgctgcgctttcgcttcgcgccacagcttgagcaggcgcttgcgcatcagcgggtatttcagccggttggcgctgtacaggtaccaggagtagctggcgcctcgcgggcagccgcgcggttcatggttgggcagatcggggcgggtgcgcggatagtcggtttgctgggtttcccaggtcaccagaccattcttcacgtagatcttccaactgcaggaaccggtgcagttcacgccgtgggtggaacgcaccactttgtcgtgctgccaacggctgcggtagccgtcttcccagtcgcggttggtgttcaaggtctggccgtgatcgccagaaaaaggctccgccaactgcttgaaatagcggaaacggtctaaaaatttgctcatccggaatgctcctgaaggctcttgtcgttataagaagacatgctcaatctgccgccagcctactgacggccaagaggcggcaaattgattgcgatcaagagaaagcgggaggcgccgcgcgcgtcggctgagaaataccaccaaagtataggtgtgaaagattaagttaattaattgaattaaaacgagtaaaacagaatatagagataaaggtgggcaggcgggaggcaaggcggggtatttgggggtaggacgcgggagaaacctcccgcgtcagactgttgacaaagggggaaaaagcgtggtttttccccctctgtggtgagcggccgaaaatcaataaattgattttccttgttttttatttgatgctctctgccaacccggcaagggtataaggtttgtcatcaatctcacgcgggagaaacctcccgcgtgatgctaactcgatgctttcagcgttggagccacagcgtcgcggtgcccactgcgggcaacgccagcgcgatctccgcacccgcgccctgctgccgccagcccgccggaaggcgcaagcgggtgcttccctcccgatagtaaggattggctaccagcagcaaggcgcgatcgcccagaataaacatccgcgccggcatttgcgggtcgcttcccgccagcggcgtcgattttcccgtcagcagataaggggtgaaggcggcgatttgctgcgacacggcagccacaccacgccaggtggcgtcaaactcccgttggtcgaagcggccggttttgcgtttgtaaaacagatcggtataagaataaaacaacagccccttggcgccgccgatcagcgcctgccaggcctgattgcggatttccgcctctgacggcggatgtggcttgcggcgggcgtcataagcggcgtgatccatgatttgcatcaccacccaggctccgcgtgcctggcgggcggcctgcaccgtcagtgcggtataacgcgtggtgcgcgtcagatcgctatcgttccccaccggataagggtcggtcgccaaaatgtcgctgctgttgaagtgagcgtccaactccccggttttgttcagcacctggaaagtcggatgatcgccgtcaagtcgctttatttgcaggtttttttcctcgattttatcgagatattccggccccagctcatcgttgatgtaccaggcaagcaggttgggctgagagcgcaaacgctgcacgtaccaggcagtcagcgccgcgtagtcgccaccgcggacggccggcgcgaagcggctgccgcggtactgatctttgacggagtaaatgaccaacagcccgcgcttgcgtgcgttgcggaaaaaggcgtatggatctttcttttccccgtaatcatagttcagcaccgtgttgaatcccgccgaggcgatgcgcgccaaatgctcatcggtagccacgttggcgtaaatgcccaacgggaaaagccgttgaccgtcgcgcagggtaaaaccttcgctgtcgatcgccactttggccgcaggctgcccgacgcgaaaagacagctcgctgccctgagcctggcgggattgtggaccggtaacctgctgacgcaggcggtattcaccctgggccaggccggccggcggttggtattcgatacggcgttgtccctcaacctgataacggtcgcggctactgtgaacaacctgcccctcggcattgagcaattcgctgtcgacctgcaaatgctgcggctgcgaagtgacgaccagcgtgtcaaccttcccctgcgccgacgcgccgagctgatataacgccggcatagacgctcgagcacaggcataggcgtcgtcaaaccaggcggtaccggtgctccccttacgcagataaacgccaaaagtgattcgcgccgcctgcggcggcacggtatagctggcgttcacctgccgccagccgctgtcgccggttaccccagccggatagctgccttccagaaagcgcccctgcgcatcaaagctctgcagataaaccccagcgccgccgtcgcggctttgcccgcgtacgccgcgagtcttgagccagacgccgaaatctatcgtctgtccgggcacaacctgcagcgcctggttgaaggtacggtattgcgctacatctgcattgtcataacgcagactccccctgccactgtgcgtatcgccgtcggcctgcgcgccctgcgctcgccagccgctgagcccctgctcaaagccggggttggtcaacagattgggttggcagttctgcgccagagccgctgcgccccacaaggcgcaacagcccagagccgcccgccgatacatccccctcatggtcatttccttttcaccacggcattgaacagataggtggcgaacaaatagcaggatttctggtacgacagccccaaatgctgacggtaaatccgccattgccagtccgcagcgcggattttgttgcccgacagcgaatgagtagacaatcggtaacaggccagcggttcgggaatgcagtaggccaggccgttacgcgccttctgcagcaccgccagccacatcaaatagtcctcatgccccactttttgctgatacaccttaccgatgcgcttctggttatagatgccggtgagattgccgatccagttgcttttcaacatgtcctgatagccgataagctcatccgcaccacgggtgtttttgatcaacttcagatcgtcttcgaaggtgtaataatgggaacacaccacgtcatagcggcgggtttgcaaaatgctcgcctggcgcgacagcttgttggggagccatacgtcatcactgtcgcagaaagcgatataatccccgctcgccgcctcaatgccgatgttgcgcgtttccgccacgccctggttatgctcattgcgtatataggtgaggcgatcgtggataaacggccgcaccacctcggcggtgttgtcggtggacgcatcatcgatcacatacaggtgatagtcggtaaattgctggttcagcacaccaagaatcgattctttgattgagtttgccgcgttgtaggcgggcattatcacggatatcttttccattcggtcctcactcaatgagctgttgccactggggataaatacgttcgggagaaaaacggcgagacttatcaagcgcagcgacagaaaagcgctcgcgcagagccggatcgcgcatcagttcgagcacgccttcgctgaaggcggcggcatcgtcatcgggcaccagatagccgttgacgccgttgtctatcagctcggccgggccggtcttgcagtcgtaggccaccagtggcaggccgaaactcatggcttcgatcagcaccatcggcaacccctcatagcgcgacgtcatcacgtacaaactggcctggcgataataggccgccacgtcggcggtggccggcagcaggctcacctgctgctccagcccggcgccttcaatctgccgccgcagtgcgtcgcgctcagggccgtcgccaataatcaacagccgccaatccggcatctgcgccgccacccctcgccacagcgcgatcagacgctcgaagcctttctgattgctcaaccgccccaccgccagcgccaccttttcctgcagcgccggcgtcggcgcctgtgcaccgaacggcgaaacgttctcgatcacccggcatttcccggcacccacccagcgagcgatggcgtcgctatcttgccgcgtcaggaaaatcacgcgatcgctcaagcggtaaaccaacaacttcaaccatttaaatacgcgcggatactggtgaaagctgacgtgttcgctcaataacagccggctgcgggcacagaacaaacgtagaaaaggcgtcatcaccaccgacagttttcccatggaaacggtaatgatcacatccgcgcgttcacgccgcagagccaacgccagccgccatggccagaacagcgaatcgccgccgccacagcgtagccggacgttgctcgccagcggaaagaagctccgttcgccacacagcgaaaacaccgccacctcgtaattcggcagacgcgccagcgcattggccaaaccgctggcgacccgttcagtgccgcccttgcccgccatattttcgatgacgatgattaccttgcgtgcttgcatatcatctcctgaatccctggcgcacattgcgcaacagccggccgccaaccgagaacaaccccagccgcgtcagacaatcgccataccatttgatcatcttgaacttgccgctcaggctgtgccgcacgatgcgcgacgaataatagttgaacgcctgggcgttttccgaatacagcgaggccagcaggtgcttgcaggcgaatccgctgatatggcgatcgctggggctgaggaaggtattgatgaagcggtcgctggcctccagattaagcttcgccgtcatgcgtccgtagcgccccacgtcgagaaacaccccgccgccggcgtcatgcgccacttgcgcgcccaaattggtggcgttgaccagaaagccccaatcctgatgtttgttgagaaactcgggaaataaaaagcggcgatcgctttttttacgcatgctgatggtggatgaccgaatatcacccatttccagaaaaagaaaatcctcaccggaagaaccggatttgtagtggaaattgaagtcgcgtaccgaatcaccactcacctctgcataattaccgaagataatatcaatatggcgatcttcatgcttcttcatgcggcgaataatatagttggtagtgaagtaatcatccgaatcgagaaaaaacacgatctccgattgcgctaaattggcgcccaggttgcgcgataccgccgcattgctcttttgttttttctcatgcagcatcacgttgctattagtcgccgctatctggcgaatatatttgatatcatcctcgtcagagcaatcatcaaccaaaatcacctgatagtcgaacccttggcaagcgttgaaaatccgcttcagagttttaggcaggtaacgcgcactattataaatagggatcacgatcgagaaatccatttcttaaccctccaacttagaatttatcatttcttttccacggcaaagcagcaataacgacacgttaaataccgggaccaaaaaataggtttccgtaaaagttgttagcaggaaaaccaccaccacccagcgcatgaatcgactcagcctgcgcatattccccaacaggtgaaaataacaaaaaagcatgacaacagaggctatcccaccagccgaataaaacatggcgatgaagaaaaaatcgaccggcttatagggttcgatattcatgccgaacagcggattgggtagccccaccgcctgaaacatctgccaggagaaccagatgcgcccggtcaacgcctggttcaacagcgcgtccaatgccggattgttcccccagcgtataacgctggcgaactgaaagcctatgatagccaacgtcagcgcaatgcagacttttctattgggggtaaaacgcagcagcggcgccagccaaaacagcaacaacatcaacagcgccaacataaaacaggtgcgggaataggaatacatcagcaccgggataattaacgccgacacccccagtgaggcgatatttttcattccacgcgttaattttgcatggtcgatcaggcacagcagcatggcgaacaaggcaaaagaataatacgccaaggtgttcgggttatcgaaacccagcgttaatctgttgccatagcgctcatcaagataaacaaatccctcggtgtaaaaggtataggggataaccatcaacagcccggcaaccacaaaagcgatagcgaacatttcagcgccgcgcaccatctcgatgcggcggaataaaattatcaccgccgagctgaataccgcgccaaaaaggtaatcaccatgtccggtggcgatattaaccagaaacagcagaaccaaaaaacccgcaaccgctttttccgccatcgtagcgatgaaaaatgcatagccgacatagagcaacattagggcattaagccccgtcacggttttattaatcagctcgctgttgaacgatcccgaggtcaggaaagttttcacgaaaaagatcaacaggaaggtcaatatgattgattgattgaccaaatcccgcgactgattataaccgacattggcatgcatgtgaaaattggaggcgactctctgcataagcgtttactcagtaaaataactgccccattcctgctcgatgttttccggcttaagcttgcttaaccccgcaccaggcgtaaacgtcaattcaccgaaatagaccttctcaccgacctggtagaaatccacgcggacataagagaactgctgcgcaacctggcgagccaagcgcgtcatttcttccaaccgcgtaggccgcggcatcggttcgtcggcattcggcaagctgatgcggatttcggtgcggttccagtcgatatcaaaaatgtcgcgccgatgggtgccgaaacgctggtaatccacctggatgaacatgcgaatttcatggttgtcgttgaaacaatgaaacttgatatcgttcggcacctgctcaccatccagcaacatgcgttccaccatgatgcagggttcgatgtccagataatgcttttcgcgactctgctcgtaaaagttgctgcgcatccacgaactactgagatcgtacaattccgcgtagctaacctgttgcttgtcgaacaccaaccggttatagccgctgccatggttggccttcagcacgaaggcgtcgggcaactgcctgaacgtgtcgtagctgagttccgtgccatgcgcatacagctctaccagatactcttcgccccacaggccggcaataaattcacggaccttgtatttgtccgacaaggtggtgtagatgctgcgcggataaattttgcggcgcatgatcttttcgctgaagccggtcggttttgacaggtgcggcagttttttgaaatagagcgcgtatttaacctgatggtgccaggcatcgggcaggcgcttggaaatgcttttaaccagggtgtttaacatgctctctccttaatttgctgacaagacgcggcaggcagtaaaaacaggtcagctgcagtcgggtaattttcccgccacggaataaactgttcagaacgaagaatgaaatgaattccgccagtagcgtagacaccgcagcgccggtcaggccgtaccgcgggatcagcagcagattcatcgccacgttcatcagagccaccaacggcatcttgatggcgataaagtgataaccggcgaacagcacgatgctgcggtacgaaaccgtccccatcactgagaacagcgaggtcagcgtacaaatagccaggatgtcggcggccggttgaaaagcggcgccatacagcagcgcaatagccgggtgggcgaaccaccacagccccagcagcaccggcaacgacaggcccaataccaccagatacagcacccggatgcggtactcctgctccaacggatcgcgacagttggcaatacccggcatcaacgaggtgatcagtgccatcggcacaaaaacccacccctgactgagggtggtagcggcgctgaaccagcccaccgcctgctcgccgaccagattgcccagcatgatttgatcgatgcgggtataaatcactatcgccagactggagatggccaacggcaggcccactttcagcaaataacggccatagcgcctggcctggcgcggcgtaacccgcggcgtggccgcagcttccccacggaatagccagaggcgcgccagataaggtacggcgctgctgaggatgtagggtaccgcgaaccacaccagcggcagcgcaacgctcaccagcgccagccgcagcccgatcgacagcagcagcgccaggttgttgatcagcgtattgcgtttcgactgcaggcgggcatcgtaataaattttgtacacgtcctgaatcgagaaataggcgctgataagcagcaacagcgtcatcagttgactggctggcggctggctgaaatagctccatatcagcatcggcagcgccaccaccaggaacagccggcggcgcaaacgcatcgaagccaacatcaggcgaatgccgctcggctggcggcgggcgacgcggttgaaaatgatgctgtcggcgcccagctgcaccagcggcaccacgatggcgatcgtcgccaatagatagttgagagcgccaaactgggcgggccccagatagcgcgcaacgtaaatggagacgaagatgccggacaggctgagcgaaacgcgttccagcatcagccacagggcgttggtgataatggccttcacccgcttattcctctgcctgccggtgatcttcccgatggcttggataggcgaagttgtaatagctcatgtcggtcgccgccctcttcacgatgccgttgaggattacgcctctgatcgccacgccattttgttcgaaacggcgcatgctggtttcgatctgcttgacggtgttcacctcaaaacgcaccaccaacagtgacgtaccggcgtgattgccgacgatggccgcgtccgtcaccgccagaatcggtggcgtatcaatcagcaccagatcgtagttttgcccggcccagcgcaggaaatcggcgaaacggcgatgcatcagcagctcggacgggttcggcggcacctggccacgcggtacgaaatccagattggcaatggcggttttccgcaccgcctgttccgtcgtcactttgcccaccagcatgtcggacagcccttgatgagcgtcgtccgatagccaacgatgcaaaaatcctttacgcatatccgcgtcgatcaacagcacccgctgcccggcctgcgccaccaccaccgccaggttggtgctggtaaaactcttgccgctttccgggctggcaccggagaccatcaaaatgttgtttttggcctccagcatagcgaaatgcaggctggtgcgcaggctgcgaatggcctccaccgacagatccgccggctcggccaccgccaggatcggcaggcgacgaccgccggatttgggcaacagcaggcgttgttcgcgattgcgtttcgcctgccatggcgacagcggcacggtggcgtagacgttgatgcctcgcttctccagcgtatcgatatcattgatgccgcgatggaaggccgtgcgcagcagcaccacggctgcggtgcctgcagcgcccaatatcaacgccaacaacacgattagcatcttttgcggctgaatcggtcggatagcggtttccgcctcgtcaacgatgcgaatattacccaccgtgccggccttgctgatgctcagctcctgctgtttgttcatcagttgcatgtaaacctgctgatccacctgcacgtcgcgggtgagacgcaggatctcctgctgcattttcggcagcgtctgtacctgcttgccgagccgcgccttttccgcctccagcgtggcgcgcttttccatcagcgcccggtaagccgggtgcacgcgggtataaagcttggaaatctccgcctctttgaaggtcagctcgttgagctgggcttcgagctgtacctgcgtgtccagcaccgacttggcttccagcgacagatccaccgagtcgttttgctggcggaactggttgagctgggtttcggcgttgttgagcgaggtttgcgtttgcggcaactgctcctgcaggaaggccagcatccgctgcgcctcttccgttttgcgatccacgttctgctgcaggtagttatcggtgatgttcttcagcaccgcctcggcacgctgcggatcttcgctcggcagcgtaaacgtcatgatgccgctgtctttgccgctcggcactacgcccaggtatttacgcagatcgtccaccgcttcttgacgcgcgactttaaccacggtgaaactggtgcccggcgccgcgtccagcgccgaaacggtcatgccccactcgccctgcgccaccggttgcccaaccacgccgctgaacaatttggcgccgtcatggctcagctcgtaatgttgcccatcgcgcaccgtcagcgtcagcgcttcgccctgcatgtccgccggcgttgtcagcgtggcgatgtccaataccggcgccttttcaccgctcagtcgggcaaagcctttaccgaataccgggaaatagtccggttcgacgcgcaccgtcaggccgagggcatccaccgttttgccgagcacgtagcgcgacttgaccagcgtcacctcatcctgcgtcgccgcattttgccccagcgaactgtccagcgtttcacgcagcagcgaatcgccggacagctgattctccacctgcaccaccgccgtggcctggtacaccggggtagccaacagggcgtaggcgacgcccagcgcaccgaccacgccggtcacgacggcgatccgccagcggttatcccacagcggccctaccagacgctcccactccagcttttcatcttgttcggccaccatcacggacagcgcattatttttcatcttctgttccttattcaccctgctgagttaccagttgcgcacgcgcaaggtagcctcgctgagatcgttaaaactgctgatggtcggcaccagctggctgatcaaacggttccagcgcgcgaccggcgccgcggtgacgtacacgacgtcgtaagggtgcagctgaaattcagcgcccatcgccagcgcgctggcgtcggagagatcgaactgatacagcgtcgccagccgctgcgggggattgccgccgctcggccggatcacgaacaccccggtcgcatccgccaccgtctggctgatcccttcggaagatccgagggcttcggtcagggtcatgccgctgcgatccatcttcagcgtcgcttgcttgcccacctcgcccatcacgaacactttcaagttgtcattgcgcggaatgtagaggatgtcgcccggctgcagcagctcgttctggctgatgtcgccacgctgcatcagcgcctgcagcgagatggcccgctctttgccctgatgggtcagcaccacgttgcgccagtcggcattgtccgtcaggccgccggcggcgttgatcgcatccagaatggtcagcggcacgttggtgatcgcctgctgaccggaggttttcacctcaccggtcacataagccttctgcgaacggaacgcggcgatgctgacatccacctgcgggctttccacatactgcgccagacggccggcgatcaggctgcgcacttcggtgacggttttacccactaccgccacgcgcccgatataggggtaaaagatcgtgccatccgcatgcacccagttaccggtgtcgctggcgctgcgatattgcccggccggcgtggtcaactcggggtgatcccagacggtgacgttcaacacgtcgccgacgccgatacggtattggtagctctgcaaccgctgatccagtgccggattcggctgggcgaccggttcaacgcgccgcattttctgcagcagcatcggtgacatgcgataaacctgtacctggctattcaaatcgaaatcgtcgtcttgttgcacgacgatggcttttccgctggtcgataaatgtgagccgggaaccaccgtacaaccgctcaacaacgcggaggtgaaggccaacggcatcaaaagaggcaaatgaaaattcatggaagtaccgtgataaacgggctgctgccgcagcccgtgagaggattaacgcccgacggttggattatcgctgagcatcgtcgcctgacgcggttcgcgcaacatggcgaaataaccgcaaaaacagaacagaaacgccaccagcatcaggctttcctgcagttgcaacacttcactgcaaatgccgatgcaggccagcgtcaccgccagcatggtgctcatcgccagtgcctgacgcgcattgagcccgcgacgcatcagaatatggtgcaaatgatcgcggcccgctttgaaggggctttggcggcgcaacaggcggcgcaccatcacggtcaccatgtccatcagcggaatggcgatcagccacagcgcggtgaccgggcgcattaccgcctgctgcccctgcgtcgccagcaacaccagccacagcacgctgaaaccgatcaccatgctgccggcgtcccccataaagattttgttacgcgcgccgaacaggctcaggttgaacagcagataagccgccagcgcgacgatcatgcccaggcaccacagcgccagatcttcccggccacccagtccgaacacgatggccagcgcaacaaaggtcacgcaggacaaggcgcccagttgcccgtcgatgccatccaccatgttgtaggcgttgatcgctccccataccgccagcggcgtgagcagcaacgcgccataaccgagcatcacttcctgatggccccaggcatggcccaatgaggaaagctgcatccctgccgccagcatcatcgccagcgcgatccctccctgcaccatgacgcgcggcgccacgggcagatcaaagcggtcatccagtacgcccaacaccaccagcgccgtgatgcacagcaggtagacggtgttgtcgggcagccagacgggttgccacagcgtcatcagcatcagtgtcaggtaaacggcgatgccgccgaccaacggaatatgtcccagatgttgcttgcgcgcattgggcttatccactaatcccaccgtcaaggcgacccggcgggcaataaggatccacgcgaccgccagcacaaatatcacgctcagttgatataacatcgttcctccagcgaataagcacgctaccgcccttgagttacagctcccaatgcgctattaacaaaaacaaaattgatcctgccaggatataagtcagcatgaatttatcctgaaaaatacagatttatccgcttgtcggcggaataatcaaataacgtcagcgtgcgattaagttatctatcagaaaactcatgtttaatggttctttcgattgccgaatcaagttcaacaggcgccacgaaattatttttcacattacttttaaactgcgttctggcgcagaatttctgtactctgacacgactgattgggaatttctttcgacttattttactcacaacatccaatgcggttgcgccgcatatgcctacggcataaggaatgcgaatcgtcttattttctctccccaatgaagaggaaattacgtcaaccaattgattcatcgtaaagtccggtttatcgacgtagttgctgacctgataacttgactgttgatccagtgcatattccagccgcgcggcaatattttcaacgtaggccatcgacttcatattattgccgctgccaatcatcacgaaacgtccgctggcgatctgacggaacaggttatacacattgccacggttgccttcgccgaataccaccgttgggcggatgatagtcaaccgattttcctcatcggccttgcgccaggcttcataaacgtattccgcctcgagcttggatttgccgtaatggttgaaaggctcgaaacgtccttcttcgccggtctcctgtttgacgaagccgtaaacagcgaccgaggaggtgaaaatgatttgacggatattcagggcggaggcggtcatgcagacatggcgcgcgccttcgacattgacctgataatagagcgaaataggatcgacattgtcctgatgctccgccgccagattaatgatggcgtcgcagcccgccagcggttcttgcaaggtctggggttgcgtcacatcgccatactgataaagggatggaaaatgtgcactgggttgcttatcgacgatgaccaatgtcagatcatcgcgcttactgagacgcttagccaggcgtgttccgataaaaccggaacccccgataatagctactttacgcttatccataatttgtcactcagcaggttatcattattcccgtcacccgattgggacaggacgctaatacgcgttaggtaatgatttccagactggacaaatcgaacctggctttcaaataacaaataatgaaataaaagattttatcaaatgtaaaattatcgctaaagataaaacctcatttagcgttaatttttaacatcgtaagcaacttgatattgcaaggttttattcggcaatataagattaatccgacctttgcccggcgtcgaagaggtctcatattttaccggcagtttcagatgaccttgcttaggatcgacacattcgatggtggcttgatccatgttctctccctgatacagacagaccagcgtttgcgggctgttggtatgggggttattcagcgtcagcgtcaacaccacgcgcgtgttgttctgaatatcattgatcaccggggggcgggtttggttgccgagcacatatgaaaaatgtgaaataaccagcaaagaggcgagtagcgtcaggtatttcactacactgctggcgggcatgctgaaaaagcgacgcgccgccgccgactttttttcacgcgccggttctttggatgactccaccgttgccacaggcgcagcaaccagcgtcgatttatgcggcttatctattttttcatcgtttgtttcagacgactcactttcactttcagaaagttccgcttgaatatcaacgccaatatcttcaccgccatttaatatatcatcatcagcgtagtcttcatcctcggatataaagtgaaaagccgcttgattttccaccttgtaacccaaacgaggaatggttctgataagcgtgtgttccgtgtcgctaattttttggcgaatagatttaattgtttgatttatcgttgaatctgaacaataggttcctttccagatattttctataatttccgttcgggtaaccagttctggcgatctggcgacaagcagcgaaagaatttgatactccttccaacgcagacgaagtttctccccggcaggagtcaaaacatcgagattcctaatctttattcttttatcaagattcacttttaatttccttagcgtgcctgtcctgcacactttgtatagaaatatcaaaaaatgttcaagaaattaaatgtaaactcaacaggttgcattcatcggatattggcctttataaaaattttctgatttcattttttacattaggccatattaaggatgttccgtttatccaaatgactctttttccctgttggcaacatggatttctttcatggttaccgtaaaattcaaatgaacaccccattgatttaaaaagaaaaaactaaccatactgttcgattgttaaccaaatgaaattgtgaaatttcattcttatccgtgaattcatggtgttttcccacctaatctgattgtcagatagactacaaaaagccgaaaaaaacagaatgagagttgtctgatttaaccccgttacacattccgctcggtgtatgctgcatctaagacaaaatcctattactgattttataacaatcgcactaattatgctttgccctcccggaaatttcatttaatctgcgaaaagacattaacgccttaatgtaagaatactctcaataaaacgaaaaaaacgtgcaaataatataatccgttttggcgaaaacattctcacattgagagatagtgctataaaaaaagaaaaaaacggcaagcgaagatgagaattttacctaaagacagaaaatttcactgaggaggtgaggagagatgactcggaatgagagaaatatccctcccctggcgggagggattgagaaagcagtttgatcctcaggcctttttcttgcggccatacaccgcccaggtgatgaccacacacaagatatagaacaccaggaatactttcattgcccccgccggtgagccggtcagcgccagcgaggtaccgaatgcctggggaataaagaagccgcctgcggcaccgatcgccgagataaagcccaatgcggcggcggagtccgtcaccgcttcacgctgtgcgctctcgtcactgccgccggccgctttcacgcgatcgacagtgattttacggaaaatgacggcgatcatttggaaagtcgacccgctgcccagccccgccgtgaggaacagcaccataaagatgccgtagaaggcgatgaacgaaccaccctcgcccgccgtcggcaaggtcaggaacaacagcgcggcgaacacggccatcaccacaaagttgatcaacgtcacccgcacgccgccgaaacggtcagacagcgcgccgccgaccggccgcgccagcgccccgaggaacggcccgaagaaagcgtaatgcaggatcacgacctccggaaattgcgtcttcgacagcatggcgaaaccggcggagaaaccgatgaaagaaccgaaggtcgcgaggtacaacaaactcagcatccacaaatgcccacgtttgagcactggcagttgctggcgcagcgatgccttggccgccgccagatcgttcatgccgaaccaggccgccaaggtggcaaccagcaggaacggtacccagatccaggcggcgttttccagccataacagccccccttctgcctgatcttgcgccgtgccgccaaacagaccaaacaggctgaaagagatcgccagcggcgcgaccagttgcatgacgctgactcccagattccccaacccgccgttgagacccaacgcgccgccctgacgcgctttcgggaagaagaagctgatattggccatgctggaggcaaagttggcgcccgcaaaaccgcacagcagggaaatgatgacgaacacgctgtacggcgtgctgctgtcctgcaccgcgaatcccagccacaagcacggcaccagcaggaagcaggtgctgatagcggtccagcgacggccgccaaacagcgggatcacgaaggaatacggcacgcgtaaaatagcacccgagaccgacggcagcgctgtcaacaggaacagttgatcggtggaaaagttgaagccaaccttgttcaggttgaccgccacggcgctgaacagcatccagacgcagaaggccagcagcagacagggaatggaaatccacaggttgcgggtggcgatgcgatggccgcgctgcagccaaaaggcgctgtcttcaggatgccaatcctgaatcagcgcaccggttttctttgatgaaggcgttgcaagttgcgacataaaaacctcagacacgggggattattccgacaccctagggggcggccccggcggcaaagttgatgtatatcaacccgaatgcaagtagttggcggcacaaatagcgccttcatccccttaggggtacgttccggataaaaattaaatcatttataatcaataaattacaatcaatcgcttcgtcatcctcaccgcttcgccgccccgctggaaactaatgggtacttcattcgaggtatggggttatgctcagggataatcaaaaatacggctgaatcgtgacttgtttaccccgtcgccgccctcgcccctgagcttcagcggcgccaaatgccaggaacccgcgcttatgaaacgcctgttggccccgctttcgatcgtgaatcaggtcgccctgctgatgttgctgtcgggcattctgggcgtggccggcatggggatttccgcctggatgtcgcaaagcattcagggcaacgcgcatgccatcaacaaggccggctcgctgcgtatgcaaagctaccgtctgctggcgcaggtgccgctggatgaacggcatgaagcgttgatccgcgaactggagcgcgacgaaaacagccccgacctgcagcgttcggtggagcaggaagggttgacgcaacctttcgacaccttgcgcgactactggcaacagaccctgcaacctcgcctgcgtagcgcacagcgcccggccgacgccgcgccgcaggtggcgcacttcgtgcagctgttggataagctggtctcggatatcgacaggcaaaccgagcgccgcctgctgatggtgacgctggtgcaggccggctttatcgcgctgaccctgctgctgctgatcggcaccacctgttacctgcgccgccggttgctgcatccgtggcggcagctggtggaaatggcgctggcggtgggccgtggcgactttagccgccgcttcgcgcagcgcggccatcaagatgaaatggcgtcgctcggcggcgcgttgaacaccatgtccgacgaactgtcggccacctacagcgggctggagcagcgcgtagccgagaagaccgcggatctgcagcaaaaaaatcagatgctgagcttcctctatcgcgccagccgcctgctgcacgccagcgagccattgtgcagccgcctgacgccgctgctcaaccaactgcaaatcctgacgccgctgcgcgccattcaggtgcggctgtatgaaaacgacagccgggagccgctgctgcagctgagcggcaaccagccgctgcggccggagcattgtcataatccggtgtgcagcgcctgcctgcacgacagcgaccgccagcatcccgacaacccgtcgctgagctggagcctgagtgacaaacttggcgactacggcgtgatcgtggcgcaacatgcgccgcaacagccgctgaacgatgagcaccgccagctggtcaacactctggtggagcaactgaccagcgtgctggccatcgaacgtcaggtagaccaccagcagcagctgatgctgatggaagaacgggcggcgatcgcccgcgagctgcacgactccatcgcccaatcgctctcctgcctgaaaatgcagatcgcctgcctgcagatgcaaggcgaaacgctctcgtccgccagccaggcgctggtgcagcagatgcgcgaagagctgaacggcgcctatcgccagctgcgcgagctgctgaccaccttccgcctgcagctgaccgaaccgggcctgctggcggcgctgcaatcgacggtagcggagttcaatcccaaactgggcctgaacatcagcctcgattaccaactggggccgcgcacggtgcccgcctaccaggccattcatctgctgcagatcgcccgcgaggcgctcagcaacatccttaagcatgccgccgccagcgaggtgagcattcaggtcatcaacaaacggggtgaagtgaccctgagcgtatgcgacaacggacgcggcctgccggccgaaacatcccgccccgaccattacggcttgatcatcatgcgcgatcgcgccaagagcctgcacggccgttgcgacattttaccgcgcagcggcggcggcaccgaggtgcgagtcagcttcacgccggataaccacgccatcgactaacggagacaccatgacgacagaaaccgccgccaccatcttactgatcgacgaccacccgatgctgcgcaacggcgtaaaacagctgattggcatggacgctcgcctgcaggtcatcgccgaagccagcaacggtgagcaaggggtcgcgctggcggagcagcacgatccggatctgatcctgctcgacctcaacatgcccggcatcaacgggctggaaacgctggatcgtctgcgccagacagacctgtcggggcgcgttgtggtgttcagcgtgtccaaccatgaagacgacgtcgtcagcgcactcaaacgcggcgccgacggttatttgttgaaagacatggagccggaggatctgctgaaggcgctgcatcaggcggcggccgggcagatggtgctcagcgaaacgctgacgccgatcctcgccgccagcctgcgggaaaaccgccccagcgccgatcgcgatattcagcaattgacgccgcgcgaacgggatattctgaagctgatcgcccaggggctgccgaacaagctgatcgcccgccgcctgaccatcaccgaaagcaccgtcaaggtacacgtcaaacacctgctgaaaaagatgaagctaaaatcccgcgtcgaggccgccgtgtgggtgctgcagggcaaaaacggttagtcgccgccgtacagcggcccggtttgcgccgggatcggcggcggcgtcagggttttgatcggcggcaggcccgcgtcatcaccggcggtcgccgtcagcggcggcgccactttcagctctatccagttggacgtcacgcgctgctgtttatcgtcctccagcgtgaccgatagccggtagctgttggcggcgcccggcgcgtcgtcccacggcggcacgatcgccgtccagccctgcggatcgttggcattgtgcggcggcgtcaggctcagcgcctgcgtatccccctgccaactgacgtgagaaatcccgttcaatgccttgatttccagcaccagcggcacggtttcccccgcctgcaggctccacggcggcgtagcgaggaacacctgcagcgttttgcgctggcggaactccagcaccggcacgttcttgcgttcgataggatcgtagcggctgccgcgcagcgacttggcctgcgccacatattccggcgaaatctgcttcaccaacggcaccccgagccgatagctcagcgccagctcgatctgatcctggctctgcccgcccgcgccaatcttatgcagcgccttcatcgtcaccagcggcaccggggtgtaattgagccccagctgcatcgcgcgcggatcgttttgttttttgccgctgccgaacagatcgacattatcgccgagatactgctcatagctgagcgaaccgccgatctggcgataaaacggcagatagccttgcgtcgtaatgtcgtaaccgcgcgccgggcggctgaaaaacacgccatcgccaggctgttgcgccagcgccgacagcgggtagtaatagttggtggagaaacgcaggtagtctccccaggcctccgcgccgacgctgccgcgattgcgctgccgggcgaaatcgctgtcgagcgccgtgttgtaccccagcagccagtcaccggcgatccagcgctgccccagcgcgaaattaccgagcgccccggcgctttgctgcagccagccgatctggctgtaggtcagcaatccgtcgacgtcgtacagcgggctgaataactgcccgttgctgccggtaaagtccccctcaccggtcatcttcagcgataatcgggcggtgcccagcggcgacaacagttcctgcgcctgctgttgcaacgcgccggtcgcctggcccagcagataatcctcggcgcggctgcgcatctgctgacgggaaacgttattcagatctttttcgccgaactgcttggccatctcggcccactgcttctcgcgcgcggcgtcatcgggcgcgccgcccagttcgggcaaattcgcggccggatctgcggcggcctgtgcggaagagacaacgctctccggcgccggcggggattcggcgcaggcgggcgccgcgccggccagccacaccagcgccccggccagccacaccgcctggcggctgtgccagcgtcgttttttggttttgatgagtcccgcctgaatttcgtctttcatggcaccgttggccccctccctcctggagcaggccaacccactgctttgctgtcgcctttcccgcggcagatctggaaaccctacgccccgtccaggccggggcgcctctcccttaaagcctaacggcttgacgaacagaaacaataggataaaccccaatcactctccagtgacgccgtcacttacgccctttaccgatccattccggccgccaggtgaattcacaccatttcagcaccgattttgccgataaaaagcgcaacaccccgctgttgcgcgcctccgcgcatgacattgcctcactctgcaatacgtgaagtggcgatgcgtacaactgcgcattcctcacagcccaccgcatttcaccccgatgaaatacgcattttgccgttattttaaacatccatttcacgacttatggagccccgatgtttctttccttactgtggcccgcgctgtttttcaccgcgctgctgtcggcaggtgtggtcgccttcgcgctcatcacccggttggagcgaacggcggccgggcgcgccaacccaccgcaattgcgccgccgtagcctgctgctgacggccttcggtttggcgttgacggcgctgcccttcgacctgccggcagcacaccggctgtggttgccgccggctgcggcgctgctgatcgcccttgcctggctagactggcgccaccggtggttgccggaccgattaacccagccgctgctgtggggcggaatgctgtgcaatcttgacgctcgctgggcgacgctgggcgacgcggttatcggcgccgccgccggctacggggggttgtggctgctcaacgcgctttatcggcaggtgcggcggcgtaacggcatcggccagggtgatttcaaactgctggcggcgctgggcgcctggctcggttggacgatgctgccgctgctggtctgtctggcggccatgttcggattaggcatggcattgacgcgcagccgccgcaaccgccgcgcctggcgaacgcggcaacctttcggcatcgccttggcggctgccggctggctgttgctcttgatggacgccggccagaacgcgccggcgttattcggttagttcttcagtgtctcgatcagccgattgagcaatccggccacttccgcagtgctggccgttgtcggattggccagtggctggatcactgcgagcctggtggtggataacacctcatcgctgcggatttccaacgcatcggcgggtggcgagctcaatgaaacgccgtccggccgccagtagctgccgcgcgtagtctgcacctgataactgccaaagccgaaatctttctcgacgcggtaatatatttcgcagcttaacggcccggtgcgccgcaacataaaggcgcctttcgcgctatagctgcctttattgacgacaaaggcggtcgcctgcgaagacagatcgaacgtgatatataaatcgcacgccagcaccttggtgcttacgccctgttgaagagtaatgcgcgttgtaggttgccgatccggcgcggtcagggtgcctaaaaaagtccacgattgctgtttcgagatattgcgcggcaaatggttgctggtggcggaaggggcaattccccgctcgcccagactgtacatcgcttcgaccccgcttaaaaacgacgtaacgtcgacggtgcttttgccggccaccgggacgccgccgttgtatacgttactgaaggttacctcggtattattgctgcaggcggcgatcgccgccgggaacggcgtcttcgaaccgctgtaaagagtcaactgaccgatgtcccaacgagattcgttgatgaatcggcacaacacgctcccgctctccacattctgcgcatcctggatattgatattgcctatcgtgccctgggcaaagttggtggacaacacgctgacattggcggcgcgctgcgtgttgcggttctcgcagcccaacgaattgatcgtgccgttaaaatctttgaacgagtagatatcgccgatacagtcatccgcagccaacgagccgatagtagagtaaaaccctgaaattctgaacgcagtccccttggcgcgagcggcgtagaggccgtctataaaattggtggtgccggacttgtccatccacagcaccccatcgcccgggcgattggcgtttgcctccatctgcacgttcaccagccagttaatgaacatatcgcccgagacaaacagcgaataaccgccgaccttggtgtagatgtcgcgaatatcaaacttcgtcatattgcgatcgctgaaccacacgccgtgagtgtcgtctacgccagtatcatcccgcaacgtcaagccgtgcagcgtcagattggcgaagcctttcaccacgatcaccgctttcttcgtttcgccctgttcgttggtgtaactgctgtccgccgtcttgacaattttggtcgcccgtcccaatccgaccacccgcaaaccgatgccgccgtagatgtccgttgtcgtctgaatgagtacgtgtccggcgaccgtatacacccgcttcccaagggacagcgtaccgccggcttgcagcgccgccgccgccgctttgttgatcgccggcccccagttgcttccgtcgctgtcctgataaaactgttccggcgtaacaacctcaccggtggcgatcaaggttgctgcgcgcgctcctgaagcgttttcgttattgtccataatatctcctgacgtgatgtgtccgcatcattgcggacggccgcggtgaaaggcgtcaacaacgccgcctttcagtgccaatctatcaccgtcatatgagcgcgttatgaaatttcattttatttcaccctgacacaacatctcgcgatccgaggtagcaatagccagcgatttcactcgccgttggcctttggtgcgacagaaagctcggacaggcccgctacttgctgacccgatccagatacagcatgctgttggcgatatccaaccgggcaccttcgacgttgtcccgcaatgccaccagcgtttgcccctgcagcgccaccacatacggcgaactggcctgcagttcccgttgcaacgcgacgtaacgtgcgctgcgcgcggcgctgttcccttccgcagccgcggcgcgcgtttccgcgctgatggcgggaatgttccactgggtgcgccaggccagggttttcggcccaccgggcacgttataggcaaaggcgctggcgttggtgttcggatccaggtagtcggcgccccagtaggtgaagatcgcctgaaaatcgcggccgcgcatcttgccccacagatcgctttctaccaccggatggatatccaaccgcagcccggcctgcgcaaaactggcctgcagcgcctgcgcgatgtcggtatacggcggttggttgatgacgataagatcgatgcgcgtgccttcagcgatgccggcatcgcgcaggatctgtttggctttgtccacgtcgagcttaaacggccgatcgtcgagtgccccgtccaatccctgcggcaagaaggcctgatgcacgcgatattgccctttcagcagttgctcggcgatgctctgataatcgaccagccagcgcgccgcctgccataacgccggattgcccagcgccggattgtctttgctgccggtgttgaaaccgaggtaatagatccggggcgcatcggcctgctcgatgcgcacgccagacgcgttacgcagtgagtcgaactggtcagcccccagatcgtaggccacgtcggcatcccctttcagcaacagcaaacggcgggtaccggcgtcgctgacgttcttgaacaacaccgttttcaaccttgccggcgacggagcgtagtcattacggccaaacagcagcgcttcatgcggcacatagttgttcacccgatacgggccgccgccggcggaatggctgcgcagccagccgttaccgtagtccccctgctgcgcgtgctcgttcaacagcttttcatccacgatcgaagccacattcgccgtcagcagccgcagcgccaactcgctgccgatgttggcgggccaactgagttgcacctggttatctcccaccttcttcagctgttgctcaacgttatccggcgtccagccaaactcgccgagaataaacgacggcgccttgttcagcttcaccgcgcgaaccagcgaaaaaatcacatcttctggccgcagtgggttgccggaagcgaaacgctgctgcggtttcagggtaaaggtcaggctgcggccatcggcgcccgcttgccaactgcctgcggcgtccggcgccagcttttgcggcgcggcgcgatccggcgccaccaggcgctgatagaggttgaccagattggccgaactgacggtttcaaagctctccgccggatcgaggctgataatgccctccaacgaactgaccactaccaaggtatcctgcggggtggcagcctgcgcaccaaaagcggccgccagcgcgccatacaataaggttggaattaaccgtttcatcgatacactctccacaatcacgcggttgcgctgtttttcgagtgtagggggtaagaattaacagaagaacgacgataaattgctttatttattaccaagatggatatgcccgccgcgttggcgggcacaggtttaaatgctgatgcggccgtgcgccattgccaccgaacgatcgcacatatggtcaatcacgtccgcatcgtggctgaccagcaccatggtcagatcgcccgcctgcttcagctcgttgagcagattgaggatctccgcctgcaccgacatgtccaacgccgaagtcggttcatccagcagcaacaacttaggccgcagcaacaatgcgcgcacgatcgccacgcgctgccgctggccgcccgacagctgatgcgggtagcgatccagcaggcgcggatccaaccccacctggcgaaagcccgcgctgatcttgcgttcgatatcgctttcctgcagcagcttgagcggctccgacagcgtacgcaacagccggtgcttggggtgtagcgaagcatagggatcctgaaacaccatctgtacctcacgccgcagctcgccggtaaatgcctgccccggttgcagccgccgccccagcagctcaaaaccgccctgccagctgccattcagcccggccagcacccacagcaacgaggacttgccgcagccggaaggccccaccagcccgaaacactcacccggttcgatgtgcaggttaacctcatgcaccacggtgcgcagctcgtagccctggcggtgactgacgctcaggttctccagtgcgattacgctcatttcaacgtctccaacagcgcgcggtccagcaccggcagcggtttgccgcgcgtctcgcggctcggccggcacgcccacagcgtgcgagtgtaaggatgcgtggcctgcgccagctctgctgccggcagttgatccaacagctcgcctttgtacatcaccagcacccgctcgcagtggtgcgccacctgctgcaaatcgtggctgatcaggatcagccccatgttgcgttgcgccaccagattgtctatcagttgcagcacctgatcgcgcatctggtgatccagcgccgaagtcggttcatcggcaatcaacagctgcggatcgttgatcaacgcaatggccagcatcacccgctgccccatgccgccggagagctgatgcggataacggccccacagcgccgccggatcgggcaaccccaccgccgccagcatctccaataccttttcacgccgctcggcgcggctcagcttggcatgcagcaccagcggctcctccacctgacggccgatcggctgattgggattcagcgcatgtttgggatcttgcatcaccatcgccacccggtcgccgcgcaggcggctccactggcgttcgctcaggcgcgtcaagtcttcatcgccgagcgtcaggcgctgcgcctgcagctgcaacgtcggcggcaatagccccatcagcgcacgcgcggtcaacgacttgccggaaccggactcgccgaccagcgccagccgctcccgccccatgctgaacgagatattcttcaccagcgccgccggctgcggccccggcacgccgatcgccagccgttcgacggtcaataaagtgttatcagtgcccatgacgaggatccattttgtcgcgcaggccatcgcccagcaggttaaacgccagactggcgaacaggatcgccccgcctggtgcggcggcgacccaccattggtcgaaaatcactttactgccttcggccaccatcgaaccccattcggcggtcggcggcgcgacgcccatgccgaggaaccccagaccggcggcggacaggatgatgccgcccaggctcagcgccgcacgcaccaccgcgctcggcaggcataaaggcaaaatgtggccgaccatcagccgcaacccgttgataccctgcatgcgcgccgccgccaggtagtcactgcggcgcagcgccagggtttcggcccgcgcctggcgggcaaaggccggccagctggtcaatgccagcgccagcgcgccgttcatcagccccggccccatcaccgccacgaacgccagcgcgatcaccagactcggcagcgacaggaaaatgtcggtcagacgcatcaaaatgcgctcaacccagccgccgaggtaaccggcgcaaatgccgaccagcaggccgatgggaatggtcaacaccagaatcagcgacaccaggatcagcgtcggccgcgcgccgtaaatcacgcgggagagcaaatcgcggccaaagccgtcggtgcccagccaatgtgcagccgaaggcggcagtaaccgcagctcgatatgctgcagattgggatcgaaaggcgccagccacggagccagcagcgcggtgacaagcaggatcgccaccagcgccgcgcccagcgtcagcgtggtcaaccgccgaccgcggcggtcaccgacggctggctcgctttgcggttcgtgttcagagagatattggctcatcgagttcgcggatccactaaataggtcaaggcgtcggccagcgcattcaacagcacgaaacaggtgccgatcagcagcgtggcaccgaggatcgccggcgtgtcggcagcaaacagcgccgaggtcaggtaacgcccgacgccgggccaggcgaacaccgtttcggtcaataccgcgccctccagcaggctggcgtaggagagagacagtacggtgatcagcgtgccaagcacattgggaaacacatggcgcagcagaatgcgcaggcggccggcgcccttggaacgcgccagcgtcacgtattccttgttgcactcttccagcatcgccgcccgcagcagccgggtaatgcccgccatcgacagcagcgccaacgccaccaccggcagccacaggtggccgatggcgttgtagaacatttcacgatcgccggacagccagctgtcgatcaacacgaaaccgctgcgcggctccatgctgtacaagtaaatgtcgtccagccgccccggccccgccgaccaatgcagcgtggcgtagaacagcaacagcccgagcaggctcagccagaaaatcggcaccgaataaccgatcagcgacagcagacgcgccgcgttatccagccagctgcccggtttgagcaccgccagaaacgccagcgtaatgccgccgagggcgccgaggataatggcgcaggtggccagctccaccgtcgccgggaaggtacgcaacagatcgctcaacaccggctgcgcggtaatacgcgaaatgcccaaatcaccgtgcgccaggtgcaccaggtaacgccaaaattgcaccggcagcggctgatccaaccccagctcgtgccgcacctgcgcataggtggcttcgctggcgtgatcgcccgccacctgcagcgccggatcgatcggcgccaggtgcgacagcatgaaggtgaacagcagcaggccgagcaacgtcagcgccagagacagcgcgccgccgagcagccgcccgccccagcgccaataccgccgggccgccccggcgccggcggacaggtcagcggccattacttgctgaccttgctgtagaacaccatgtcagggttgatgccctgcacatagcccttgaggttgtcacgcaccgcaatcaggctgcgcgcctgcaggccgatgacaaacggcgagctttgctgcacctgtttttgcagttgctggtagtctgccacccgtttggcggtgtcgttttccgcagtggcggccagcgtcagcttgctcagcgccgggatctgccagttggcgcgccaggccagcgtcttgctgccgtcttccgggttgtaggcgaaggcggcggcgttggtgttagggtcgaagtaatccggcccccaggaggtcagcgtcgcatcgtagttaagcgctttcaccttggtggagacctgcgaactgatgcccggcaccagttcgaccttcacgccgccctgagcaaaactggcctgcaacgcctgagcaatatccagatacggcggctgattgttgacgtccaggcggaaactgacgttgctcagccccgccttggccagtatttctttggctttctgcggattgaagctgtacggcctatctttgagcgcgcccagataaccgtccggcaggaatgcctgatggctctggaactgccctttcagcagatcgtcggcgatgccttgataatcgaacagccagcgcgccgcctcccagaacgccggattgccgagcgccggcgacgccttggcgttgaactgcaggaaataaagcgaagcataaggaatagccagcggtttgacgcccggcttgcccttcagagccgccatctggtctgcccccaggttgcgtgcgatatcggcatcgccctgctcgatcagcaaacggcgcgccgccggatcgggcacgtttttgatcaggatggttttcagcgtcggcgccccttccggcgagcccgggttggcgtccagcaccaccacttcgtgcggcacataggtgcggattttgtaagggccactgccggcggagtggctgttcaaccattgatgccccagatcgtcgccctgctggtgcgccagcgcctctttggcgtcgacgatcgaggataccggcgccgacagcaggctgagcacgaaggccgggctgacgttctcactccagctgatttttaccgtgtgctcgtccaccttgctcaggtgttgctccacgttcttcgcgttccagcccagctgcgtcaggataaacgacggttcgagattgagtttaaccacccgtgaaagcgagaagatcacgtcttccggccgcagcggattgccgctggcgaacctggcgtccgggcgcaggctgaaagtcaggctgcggtcgtcggcgccggcctgccagctgctggccagggttggtttaagatcgatgggattgtgcggatctgactggatcagacgttgatacaggctgttgaacgactgcaccgtggttaactcaaatccctgggccgggtcaaagctgaccacgtcatcgatagattgcgcgatcaccagcgtgttggccggcgtcgccgcctgtacgttaacgctggccgccacggccaaaaacagcaaagaaggaacgagcgctttcatctgaaactctccaagcggatggaatttataataattttgcgagtgtatgcgagcacgatcggcagctgaaggtacttaaatcactatagatattctttttatgtatatagatgggattttgattattagggcaaggattgcgcggccgatcgcactctcgcgacacgtcgcggcaattgcctactgtctttgcagcacgattcgcagcgatgaaagtcggggtttgagtctgtttcatcgggtgactaacgtgagctcagtcacccaaaggacgggcaaatggcaaaccatccatcagaaaatggctgctcactcctgcatgagagagcgatagagcaaacgctggcagacatgaacagcgtgctgcttgagtcgaatctgtttatgactcgtctgacggtacaagaccggcgctggcaaaaaggcagaaaaaacggccatacgttaaattggcgctctctgtttaaatatcatgtccaaatgccgatgagtttcgcttttgtctaccggcaaatagccagcccgctgagccgcgccggcttttgcctgtgccgttatctccaggcggagaacgttatcgaacttgtcgcgctggagaatttctccctgcgcgaaacgcaacatcccctgaaaggcaatatgctgcgcaactgcttgcaggcgctatatctgtatgggctgaacctgcaagagcaggggctgacgccggcgtatccgccggacatacttatcagccacgccattaaccatcacgtgttagcactgtatacacgtcaggccgcctttgaagtaatacccggcaccatgacatgtaaaaccagcttcaacgcactgaaaaagtacatacaatcgctggaaaaatacggtgccagatgtgataaggtgcgtataaataacgagcagcaaggaagccaaaatggaaaataaggatctgaccgaccccacgctctccattcaagagcaaaaacgcatcgccatcgagattttacgtcaataccatcgctgggagatggctaacccacgtccagccgaagaactcccggaatgggaagccatcggcccgttcagaaaaagcaagcgtcaccttatcgaacgtaccgatgactgaccatgcattagcccgcaagcgatcctgcagggcaatcccgtgttgttaaatctggtagtcaatcaccgcatccagctgcgacgagaagaccttgtctttgatttcggtcagcgacaacgtcgggttgcacagctgaataaagcgccaggcatagttgcgctgcagctggctgcgtttcaggcccagccagaccgtattgggttcaaacaaatgctcggcgttgaggctgaccaacccgcgatcgcgctctttttcatacgacatgtccgccagcacgcccacgcccaaccccagctcgacataggttttaatcacgtcggaatcttgcgcgctgagcgcgatgtccggcgtcaggcccgctgatttgaacgccgcatccagcttcgcgcggccggtaatgccctggcggtaagtgatcaacggcaaggtgctgagcatctccagcgtcacctgcggctgccgcgtcaactcgtgcccttccggcaccagaatggtgtgatgccatcggtagtaggggaacgccgccagcgactcgtcgctcatcagccgttcgctggcaatgccgatatcggcttcaccggcggccaacatcgaaacgatctcctccgggctgccctgattgagcaccacccgcacccgtggataaagcgcgcgaaactctttgatcacccccggcaggctatagcgcgcctgggtgtgcgtcgtcgcgatatgcagctgccccgaatcgttgctgctgaagacatccgccaggcgacggatgttgttcgcgtcgttgagaatccgttccgctaccaccagcagctctttgccgggttcggtcatgcccaacagccgtttgccgcggcgaatgaatatttcgatgcccagctcttcttccagctcgcgaatatgccggctaacgccggactgcgaagtaaataaggtattggcgacctcggtcaggttgtagttgcagcgcgccgattctcgaataatttttaattgttgaaagttcattcccgtctccctgttacttgcagtagcgtctgccatattgatacggagtcctgcggggctgaacaaataagaaataacctttacttatgcaatttaatgctaagtgaattatttatcgtggctctcggggggtgaggacgggggaaaatgatgaatggctttaaaaataatgagataaataaccatacaaataaagagccttaagtcatcatgcagaataaagttattaaatagaggtattagatatatgaaaaagggctcagcatgctgagcccttaagtgtctgctgccctgctaacgcctcaggcggtagcctcagccccgaaagcgccagggcggttctgttgcaaccactgctgtacatagcgcaccagatcgccgatgcaatcatcctgcatgccgtggtgtttcagctcgttatccagcgcaaacaggtattgcgcgttggtacccagcgggccgctggcgctggcgatcaatggcgcgatcacctggtggctggtgtctgcttcaaacaacgggtgctgcgcgttcatcacgaacaccagcgccgtgacggtctctccgccatccaactgcagttcacaccaggtcggcacgtagcagtcggtcaccatttcgcgcttccaaagcagctccagctcttcacgcagcttaccttccggcagacgaaacgccaatccggtggtctgaccgccctctttcagcgccagcatgcgccccggctgatgcagcgtgccgcgcccggcggtcaaacgcatgcagaacgcccgatgccagccctgcagcatggcgggccgcacttcttcagattcgaaaaccggattccacatcagcgaaccgtaaccgaatacccataccgggctgtgatccggccggcgcgataacgtgcattccaacgaggctgcgcgctgttcaggcgtcagcagcagcgactcctcaatagcgccaaaggcggttttgcaatccgctttttgcagaaaatctcgcgttaacactgttacaacctcccgggaatacgatttctcgtcctccctcgccactactgaacctttgcaattttattttttggtgcggaattttattaattcaataaccgcgccgattaataatgaccatattcttttcccgccgcgcaatcaagttgcaaagcggcgttaacgtggaaaagtatttgtactgagcagcaataatattaattgccgaggtcagcataacgtctgcgcgttttttaccggggcataaaagcgttactttttatgccagcgttcgtcgtcgcccttgcgatagctttgcttgaccgccgcccaggccaccttatgcgccgtctcctcccggctgtcgtcaccgcgccgatcgtcgggatcccggtattgttgccaggcgctgttgaacgcttctttatagatcgcctgcgcatgttccggtagcacatgctttacattgtccggcaagtcgctcgtgtcttggtatggcatcacgtcctcccgtgcgtattgcgtgaaccttaagcctagctcacacgcggttgcgcctcaatgagcaaacaattctcattatcaaacggcatggtatactcaccgccaaacgaactataaggagatcctcgtgactaccgaagcccctcgctcacgcgccccctacctgatcgccgtcagcgccgtacaggacattacgccgcacctgcgccgcatcacctttaccgcgcccgatctgcgctactacccggccaacgccgccgccgcgcacatcaaggtctttttgccgctcgccggtcaaacgcagccggatctgccgacgctgactgaaaacggcccgcgctgggctgcggatgccgtgcgcccgatcgtgcgcacctattccattcgcgccgtgcgcccggaacaggcggaagttgacatcgagtttgccatccatgaccaccagggaccggcggtcgactttgcgcgtcaggcgaaagccggcgataaaatcggcatcagcaatccaggcggccccaaaccgatgctgccggccgccgacttctactgcctggcgggcgatccttcctcgctgcctgcgttggccgcgctgctggaaaacctgccgccgcacggcgccgggcgcgctttcatccgcgtcgacagcactgccgacgtgattgacctggaaaaacctgccggcgttgaggtgaattggatcgtcggcggcacggagaaaaccgacgaattgatcgctcggttccgcgcgcagtccctgccgcagggggaagcgcacttctggctcgccggtgaagatcacctggtggtggagctgcgccgttacctgcgccgcgaacgtcaatgcgatcgtaatcgtctttatgccgtgccttactggcgtgaagggctaaatgaagagggataccacaataaacggcatgaaatcatggataatattgacgactaacggtcgtattttccttgattaaccacgcactaaataagtaaacacgacttttctcaaatctaacgttgtaaattgacgttattgcgtaaaagtaagtaaataaaaccgcactccgtgcggtttttttgttactctgatcacataaagcaagcaattgctttctcagataaaaacaacatcacaccggcgccgcgggtgtatcctaatataaaatacctactggaaacgcagagttgccgcatcacggcgaccggcgctgacgggctacgctgtttgagaaggagtgccaccctcatgaagtcgcaacacgatcctggccgatccaccaaatctcgccacaccgaatactcgctgatcttccccatcgccgcgctggtggtgttgaatttatggggcagcaccgctaactttccgctgatcgtcggcatcaatattctcgcgctggtggggatcctcagcagcgccttcagcgtggtgcgccacgccgacgtgctcgcccaccgactgggcgagccctatggctcgctgatcctcagcctgtcggtggtgatcctcgaagtcagcctgatctcggcgttgatggccaccggcgacgctgcgccggcgctgatgcgcgacacgctgtactccatcatcatgatcgtttccgccggcctggtcggcttcgcgctgctgctcggcgggcgcaagttcgccacccagtacgtcaacctcggcggcatcaaacagtacctgatggcgattttcccgctggcggtgatcgtgctggtgttcccgagtgcgctgccgggcggcaacttcagcaccgggcaagcgctgttggtggcgctgatttccgccgccatgtatggcgtattcctggtgatccagaccaaaacccaccagagcctgttcgtgtacgagcatgaagacgacgatggcgatccgcaccacggcaagccctcttcgcacagcagcgcctggcacgccgcctggctcatcgtgcacctgatcgcggttatcgccgtcaccaagttcaacgccaatccgctcgaaggcctgctgaccaaaatgaatgcaccggcgcagttcaccggtttcctggtggcgctgcttatcctgtcgcctgaaggcctgggcgcgctgcgcgccgtgttgaacaatcaggtgcaacgcgccatgaacctgttcttcggttcggtgctggcgaccatctccctgacggtgccggcggtgaccatcatcgctaccctgaccgggcagacgctgatcttcggcctgcaaacgccgcatatcgtggtgatgttgacggtgttgctgctgtgccagctgtcgttctcgaccggccgcaccaacgtgctgaacggcaccgcccacctggcgctgttcgccgcctacatgatgactatcttcgcctgatcaaaaaggggcgcactctgtgcgcccctgcctgcgttataccgagaagaatatcgccgcggcgatccccccgaacaaaatccacttgatgatgtaataaccggtgcggttccaggccttcagccgtttccccacccggcgaattgcatagatgtatttgaacatcttgttgacgccgccggtgcgatcgccctcttcattcggcgcggtggcggcgctcatcagattgcgccccaaccagtggttaaccgcctgcgcccagcggtagcgcatcggccgttcgatatcgcagaacaggatcaggcgattctgcccgctctggttttccgcatagtgcagataggtttcatcgaacatcaccccttcaccgtcacgccagctgtagcgctcaccgtccacctcaatgaagcagcggtcatcattgggggtaatcagccccaggtgataacgcagcgaaccggcgtaaggatcgcgatggcgcggcaaacggctgccgtccggcagttcggcgaacatcgccgccttgaccgaaggcagactgcgcagcagttccgtggtctgcgggcacagggtcatggcggagggatggctgtcctcataccatttcagataaaagcgtttccaaccggtcttgaagaacgagttgaaaccggcgtcgttgaattgatcggacgctttgatctgctggatctccatcagcttctgtccttcgtcgcggatggtttcccagttctcccgcagtaccgccagctcagggaactgctccggcttcaggtacggcgtagtcggcacgcgagaaaacagatacatgaagacgttcagcggtgcggtaaaggtggaatggtcagacagctgccgccacacgttgtagcgcacccgtccgcggtaatgcacatagacgacgcataaaataagcaaaagcagaatgatgtatttcatgtttgaatcgcatcaaagaacccacacgctatgcgccgcgcggcgcacaccccagaaaatgtccttttggcgccgcacgcaaactgcgcgccaatctggaacccattaatcattaacgctaactcaacgaaaatctatacaaataaccacaataatttacacaaaggttaaacgagaggggaaatggggggcaagaaaaaggccttggatttccggtggttcttcgttcggttacatcagcatactttgctgtcactaatatgccgtgtgagctaacgccgacctcacaaccagaaaatgcaggcgttcacctttggtgagccgtcggccgtattggatcgccgtgacattttggactacacggaatgcgtcggtaacggtaaatggattgagccgcccgtcagcttttccgggctggcaaaaagcctgcgcgccgccgtgcatcacagctcacccatttacgtgaagcgcaatattttggcgagcacctacatcccgcacccactgctatcacagcaggatttcagccggtttgtgctggattatctggtgttcggcaacgcctttttagaaaagcgtttcagcgtgaccggcaagctgttgaagctggagacctccccggccaaatacacccggcgcggcgttgacccgagcgtttactggttcgtgcaatcgttcgctgagccgcacccgttcgcgcccgacagcgtttttcacctgctggagccggatatcaatcaagagctgtatgggatgccggaatatctgtcggcgctcaactccgcgtggctgaacgagtccgccacgctgttccgccgcaagtattatcagaacggcgcacacgcgggctatatcatgtatgtcaccgacgcagcgcaaaacaataccgatgttgaggcgttgcgcgaagcgatgagcgactctaaaggcatggggaactttaaaaacctgttcttctacgcaccgaacgggaagcccgacggtatcaagattgtgccactcagcgaagtggcaacgaaggatgatttcttcaacatcaaaaaggtcagcgccgccgacctgctggacgcccaccgcatcccctaccagctgatgggcggcaaaccggagaacgtcgggtcagtaggtgacgtggaaaaggccgcaaaggtgtttgtccgcaatgagctgacaccgctccagcagcgcatcaaagaagtgaatgactgggtcggcgtcgaggtcatccggtttaaaaagtacaacctcgaaaacgacgacgaatgataaaccggccgccggattggcggcctttttatacctgccaccaaacgccctctcacgcccaccacggcccgctttctcgtatatgcccgcgaatcaaaccagcgcaacagaaagccaccacgacgcactgacgccgccaattctgataattaaatacatgcccgcgcgcaatgctatccccgccatgcctgcgcgcaatgctatccccgccacgcctgcgcgcaatgctatccccgccacgcctgcgcgcaatgctatccccgccacgcctgcccgcttcatgggtcggttttaatgcagttgcctgaaccaacgaaaggcgcgccagccagggcttaggagctgtaaaaaataaccaaactcccatgcaaaaacatgcaacatagatatgcaaaccgagagttgacgattttaaccctattggttaatttactctttttcattgaatggatattttagtcatgcatcttgacaacccggctcagacactgcgccagtttttattggccgtttgtaaagctgatcccaacaaaagtcttcgttcagcattgtgcttagcattaaacttagagaacgaaaacgtcaccgagtcagttttatgggaaaaaactgccaaaatcatgactcttacatataaaattgaagatatactaaacgattacttccccgatgaggatattacagccccaaactggcaaaagaatgtcaccgaattcttctctcaaatcaacattaataacccagtacatcattacagtaatgtaataaaaactgaaacatttaatgagcttggattgcttgccttactttttaaaacaaaaggagagataggaaaactagccaacgaagatattgatgatatacaacagcaattatccgaactaaaacaatcagtcattgaatctaatctcagccaagagctgcgtaaagacatactccactacttaaataatataattcgctcattagaggattactctataacaggaattgaacctgtcatatcctccatagaggcaacattgggacacgcctgtatatcacaaccttttcaagaggtggttaaaaacacagagattggcgctaagttgaagggggttttgaagaaatcactttctgctgtaagtagcgtggagggcgttgtaagtctcggcgccaatgctattactctaattgagcatttcagtaagtaaatgaccgtttaaatttttcacaaaaacgcgccaataacggcgcgattcttataaataaaaatcacttaccgcctcttgggaagataagaaattacaacaagataatgttttcattttctgacgattaccccacacaatttgaacaaacgaaacaaactaatcaccagtcaggttttcgttaatcataacctgctgtaaacgatgaacaaccacggccatatttattacctataaagaagatacaaattattataaaaaccatcataattacaatggcacctcactaacatccaccttgtaccctaaaaaatcagctttggcgataaacaatttgataccatttcgctttgaatactcctctataaaagccctcatatctcccgtcaagcgcgcaccaataatcacggcatcaatgcaactctcagctaaaataacggcatgtccaggggagtgtttataatgctctttcgtagagaaaaatttcagactcctgacttcctcttccttttcccaatccgtatgctttatcaatgagaactcagcactaattgtaactttttccgagcgtaatttttcaagtaaatgcttgaatatatctattttaggtggaatgtctgagtacactacatccgcgaactccacaccgcatttatttagcttttctttattatacacaaagcaaacacctttcatcccactcccataatacccccacatcaaacggctatcatattttttcgtaaaacatgcaatagccacgctttgatgaaactcatcaataataactttattgaattgctcaccccagtatttatagatatgatcgtatacaaaagaaagatcacccccaataaagcactcctctatcctacgtctattttcccttaagaatttcgtatctttaattattgtagcaatatcaccagtggatttttcctttaatgactcaaaatcaaaagaaaaaaacatttcaaacggatcatttaaactttttggctttgaatgccaaattacattattcaccaattcatttaccgtgtttacattatccccacgaaatctaaataagtgatactcactagacaatatcattcctgccccatactattcaatattaaaatcacgtgacaccccaaagattccattccctaacacttataacactcccaaattttgtgccaccgtccttcaacatcaccatctcatctagcaattgtcacaccactgccttcactaccgaaaccgcgccaatatgggcgcggcttcacggtgcaaagcttaaaagcgcgagaaattacctaaattttacgcctgttgccccgcatgcaatttcaatgaatcgcctcattacctcattggtcatccatgttttttctgtcaaatgccatacccaattaagcacaccttctgcagtctggcatgaaatcaacggaatattgtattcatatgaaacattaatcacgatataatcgtcaacaactttcacctgctcggccaataccctcgcatcttcagcaatcctagaggccatattgtcatcaaattcaatgataggcattattttttccttataaataaaaatgagttatcggtaatcaagtatacgttaccgatgggaatgagactttataactttactactattcagttatcttttcgacaattccagtattaatattaatgcgtgctgtaacagtttgggttacaataccaccataagcatttgtccctttaaatctggttttaaccactgcgtgtgggtctttcccaaggacaagatgcgacatcgtttcaacatgcttatacgatgaatcatcgttcatacttttcttaatcagcttttcaagcggacgatacgaaccatcccagccgctgaaatttccttgaaagacgtcaagattggtatattccgccagcgatttcgggtctttttgatagccagcatcacaccagccaagaacttcaccgagcggtagttcctctgatttggtgatgctgtactgactcaggcaggcatagaatccatcaccatcgtccgccggtatttccttaaatttaacgtaatcgctaacgatttggtgacggtctgcctgcggttttcttcggtactcgacaagcgttaaatccgcgtgttcaaacactgccggtttttcttctaccacttcggattttactgccacttcttgccgtggtaatgggtataaaatcgcactcaacattccgacgaacagaaaagaaaacccatatatagcacttgaacgtttccggctcggcattcttacccattgaggtttgattaaacccaacacgaacgccacaaaggcgacaaaagaaacaaatgaaagtattagctccaaaacaatccccataatgaattaattatcatgtacatactgcgtgcaatagtctcccacatgataacaaaacattcattagcagatgatgattattggctaaaacccggccactcaactatcggtggatatacaaacgactggtcgccaaagattactgtcgcccctcgagttaaggcttttagttcccaacgttcggcagtaatgcccttctgcgccagttcaaaccgtatttgcggaattcttgcccgttctgccggtgtcaaacgtgccgaagggacatcatttcgagactttttccgattccgtgcgatttcttggtgattatccttcggtgactgccctcttatcgcgtctctgagcgtcttggcgacgtccgcatcattccagctaacatccccgccctcaatcaaatttatcaccgccgtgacatactcaggcgttgctacctgcatatctggctcaggttctcgctgaacctccccacagttattgacaggactccgaggcgcgccagaggcgctttttaaagtcaaaggatcaacatcaaggtcaacggccttgcggacaatgcgccattctgttgttcgggtttcgtggatatgacccgcgccaaggtgcggtgcaaagatgccgacaaccttttgcacctcttcgtcataagcgttcagctcatcagccaccttgcgcgcgactcgaacggtctgcacgtcgcgcgggacgttagcgcctccctgtccagctatataggcggcaaaatttccagcgctggcagccgcgcgcacagcctcgacacgctcatcaaaagtttcagcaaggctgatgtggcgtaaacaggcggcccggcattctcgataagctcccatggtagggattccgatagtcttaaactgaggtatacgccatgttgacgcccatgaggtcaccgcagcggccatatcgcgtaacggtttgccggtatcgtggtcaatttggccgtcgagcgcataaccgtcgatatttttagcgatgtatttagcaatgtaccccgcagcgccgcctttattcatgtgcttggcttcaaaccgattctttgctgcaccgcgctcgtcaccgtcttccttcagcgcataccgacgcatgatgtcgactatctgctggcgctgtttacgctcgcagaacagcatcatatgccagtgcggcgtaccgtcatggtgaggttcaacgacacgcataccgtaaacgctcaggccgttgtctttaaacgcggtgcgcattttgctccagatgcgcaccagataacgctggccgtctttcggtgaaaaagcctctgaatcccaattgtggttaagctgtactttttcagccccttctttgctaacaacgcgcctagggtgatatttagacgggcaagaaaaaggccgccgaagcggccttttcagtagcgggtaggttaactgtaagcgttgagcgtgcgctggcacaaagcggagcgtacgcagtcctgtttttcaaagcggataacgccgatcatctcgtcctcttcgaagcgctccagggcatcgctgagaccggatttcacgccgcgcggcaggtcgcactgggtcacgtcgccgttaacgataaccgtcacgttttcccccaggcgggtcaggaacattttcatctggctcgcggtcacgttctgggcttcatccaggataacgaccgcattttcgaaggtgcgtccgcgcatataagcgaacggcgcaatctctaccttgccgatttccgggcgcaggcagtactgcataaaggaagagcccaaacggcgcaccagaatgtcatacaccgggcggaaataaggggcgaacttctcggagatatcccccggcaagaaaccgaggtcttcatccgcctgcaaaacaggacgggtaacgataatccgatccacctctttatggatcagcgcctccgccgccttggcggcgctgataaatgttttgccgcagccggcttcgccggtggcgaagatcagctgcttattctctatggctgataagtaatgaccctgagcttcggttctagcctcgatgggtgagctatcgcgcttgtctcgcgccatgccgatagactcgactccccccatttgcaccagcgaggtcacagactcttcttccagctggcgatgactacgagcgtcacgacgaataacgcgtttcgcttcacgacgtgctttgatcactgctttctgtctacccatagtggcaccttacagtttgtttcacctaccgcaacggccaggccgcgcgattatgtttcacacacgtattaggttttggcctcctccgagccaataagagccaagggacaaagtgaatcgacggcaacgcttaagcgctgtgtcttcacgggacaacgcggactgcatcaataaacgtggagtaaaaagtgatgagattcggtagcgataagggtgcggagttgccggtaaaagagagtcggagagagaaccctcgttacaacgagaaatcaggggagatgtgttattttttctttccagcccaaccaaggactttaccattagcgatccccgcagtgatatttacagcttcaagctgtgcaccgtgtgaaaactaccgccagatgattacagtataatgacattcaatcctgtcgcgttactaaaatgtaaaaaaattttatatgttttgtttttagttatcgctaaaacactatatcacgcgcgatacgtcattccataaaaatttttaacatataaatttcaaaggattacaattaaaaaccgcgaatgacactttggtttcctgattaaaatttgcacaacccaaaatcgcgggcggtgcgcactttttaatccatagaccaggtgtcgaattgacttttgacgctcaatcttccgtacggcaggcaaaacaaagtaaaacgaggcaggcgaacccgcctcgtcatttcggcttcaggccttgagcaggccgctggccagataatcgccaccctctttcacgcccggcaatacgaagaaatacccgccgccaatcggcttgatgtattcctccagcgcttcaccgttcagccttttttgcaccgtcaggaagcctttctccagatcggcctggtagcagacgaacagcagccccatttccagctggccggcattggagacgccaagggaatagctgtagccgcgccgcagcatcaggttgctttggctttccggcgtgcgaggattagccagccggatgtgcgcatccatcgggatcaccttgccgtcgggatcgttcgcgtagtccggctcgtcatgttcacgcttcatgcccagcggcgccccgctgtgcttctcgcggccgaagatggtttcctgctcctgcagcggcgtgcgatcccaaaactcgacgcgaaaacgaataatgcgcgccgcctgatagctgccgcccgccgtccacgccggctcaccgacgttgtcgccgacccacaccaccttatccatcagcggtttgtcgtcggttttcgggttcgcagtgccgtctttgaaacctaacaggttgatcggcgtctctttgcctttgctgcgcgccgcgtgcgcggagatgaacccctcccgcttccagcgcacgctgagcagatccggcgaatgcttaatgatgtcgcgcagcgcgtgaatcaccgtttcgttggtgttggcgcagatctgcaacagcaggtcgccgtgacaaagcgcggcgtccaacgcatcgttggggaagcgggtcattttctgcaaccgcagcggcttttgcgcctgcagaccaaagcgttcatcaaacagcgatgcgccgaccgagacggtgatggtcaggttgtccgggtaaatctccggccccatgatgccggaatcgagcggcggcagcttggcgtccacctccggcgccttaccgccgtgggtcaggaaggcgatgcgatcggtcagcagccggaacaggcgctccagccccgctttgtcggtcgccagcacatcgaacgccaccagcatcatcgccgcctgttgcggcgtcagcacgccggcctgatggcggccataaaacggctgtttctgccagcgctcatcctgcggcgtcgccaacggctccgccgcgttacccgccgcctgcgccaggcggctgccgcccagcgccagcgcgcccagccccagcccttgcagcaaacggcggcgcgaaggcgatgccgccccctgcgattgcggatgcggcccgttattcgggcctgccttgttgctcataaccgtatgcctcagtccagacccaatacgccgcgcagctgggaaagatcctccgccagcgtggtgatcggccctttcaacgcattgcgatcggcatcggtcagcttctcataggactcataaccctctttggtttggtacttcgccaaaatggtgtccacggttttgaagttggcgtcgattttgtccagcagcggcttattggccttaaccagcagcgggcgcagcagattgactatcttttgcgcgccgtcgacgttggcctggaagtcccacaaatcggtgcggctgtaacggtcttcttcaccgctgatcttgctggccgccacctcttcgatcagcccggctgcgccgcccaccaccttgctcggcgggaaggtcagttcactcacgcgtttttgcagctcaacggtgtcgtgatacagacgatcggcatattggcccatgtctttggtggagttgtcagcaaacagcgccttctccagacggtggaagccggtgaagttcgggtccgccgctttcttctcgtagtcgtcttcacgggcgtcgatgctgccgtccagatcggagaacagctcggcgatcggctcaatgcgctcatagtgctggcgggtcggcgcatacagcctgcgcgcctgctccacgttgccggccttcaccgcgtcggtaaacagcttggtctgtttcaccaacccatcgacttctttggtgacgtaaaccttgtattcagcgatcgggccgaccaggtccagcgcgttcggcttgccgtcggtggcgccgttggccgcggcggtgacagtcagtttgcctttcggattgctcagcagcccgcaggtcatgtcatattcgcccgcttccagcgtggcggtcattttctgggtaaagcccggcgcgatgttctcgcgctcttccaccaccatcacccctttcaggatttcccattcgacgtttttctggctggtgttgtgcaccacaaactgtgtcttgccggccgggaccgtcagttgcatcggttcgcactgcttgtcgttaaccgtaaccttgatctgcggcacgtccgccgccaaggcgtcgatgctcagcgcaaacgccgggatagccagtaatgctgcgtgcaacgccttgcggcgaaataacggagtagacatacgagattccctattaaacattaatgattgattttacgttgcgccggggccgctgccggctccgcgcgctgcggcaggaaaaagaaaatcagcgccgggatcagatacaggaagtagaccgccacttcgctgaccgtcggcgcttcctggtaaccgagaatgccttccagcagggtgccgaacagcgaatgggtcgacagggtgttgctgaaatcgaaggcgatgtcctggaagtggttccacaggccggcttcgtggaaggcgcggatcgccccggcggccaggccggcggcgacgaacaaaatgaacagactggtccatttgaagaatttggccaggtgcagcttcaccccgccccagtaaatcatcatgcccagcacgatggcggccaccaggccgagcaccgcgccgatcggcgccgcggcgcccacgtcttgctggaacgccgccagcaggaagaacaccgactccagcccttcgcgcgccacggcgaagaacaccatcgccaccagcgcccacccctgccctttaccggcgctgagcgcctgatcgatagccccttccagatgcaccttgaccgatttggacaccttacgcatccagaacaccatataggtgaggatcagcaccgccaccgccgccacgatgccttcgaacagctcttgctgtttctgcgggaactcgccggtggtctcattgatgaagatgccgagcgccagacacagtgccgcggcgacaatcacgccgatccacaccgcgcccagccattggctgcgctgcgtgcgcttcaggtagctggcgatcaggctgacgatcagcgcggcctccagcccctcacggaacatgataagaaagggaacgaacataactaatcacccctgaaaagaccgcggcggcagagaaaaccggctcgaaatgagccgcggcgagtatgtaaagaaacgtaaaatacaacgagagtgattatcattctggcaaaaagaaatacaagaggcacaagcgtgattttttctaatcaaatgtcgccaggtgttacagccgaatgacgggcaaacaggcaaaaagaaggggcgctctgcgcgccccttgccgactgacatcaaacggcgttataccgttttgtattcggcttccgcctgatcgaaacgttcggtcatggttgaggatggctggcggcccatcaggctcaccaccacgatggccagacagcccaggatgaagccagggatgatttcgtacaggcccagccattcgtactgtttccagacgatcaccgtcaccgcaccgaccagcatgccggccagcgcgccgttgcgggtcatgcgcgaccacattaccgagatcagcacaaccgggccgaaggcggcaccgaaaccggcccaggcataactcaccaggcccagcacgcggttctccgggttggccgccaaggcgatggcgatcaacgccactaccagcaccatcacgcggccgacccacaccagctcacgctggctggcgcccttgcgcaggaacgccttgtacaggtcttcggtgatcgcgctggagcacaccagcagctggcagctcagggtgctcataaccgccgccagaatcgccgacagcagcacgcccgccacccatgggttgaacagcaacatcgccagttcgatgaacacgcgttcgccgttctgcgacacgttaccggcctgatccgggttattggcgaagtaagcgataccgaagaaaccgacggcgatggtcccggccaggcacaggatcatccaggtcatgctgatgcggcgcgcgctgcggatggtgcggtgagaatccgctgccatgaaacgcgccaggatgtgcggctggccgaagtagcccaggccccaacccagcagcgacaggatggcgacgaagttcagccccttcagcatgtcgaggttggccgggttcttcgcctggatcaccagcatcgaggtatcgatgccgccgacggcgaagatcacgatcaccggcgtcaggatcagcgcgaaaatcatcaggctggcctgtacggtgtcggtccagctcaccgccaggaaaccgccgataaaggtatacaggatggtagccgcggcgccggcccacagggcggtttcgtagctcatgccgaaggtgctttcgaacaggcgcgcgccggccacgatgccggaggcgcagtaaatggtgaagaacaccagaatgacgatggccgagatcacccgcagcagcttgctgttgtcttcaaaacggctggtgaaatagtccggcagcgtcagggcgttgttgttggcttcggtatgcacgcgcagccttcctgccaccagcttccagttcaggtaagcgccgatggtcaggccgatggcgatccagctttcggagatgccggagaggaagatggcgcccggcaggcccatcagcagccagccgctcatgtcggaagccccggcggacagcgcggtcaccacgctgcccaaactgcggccgccgagaatatagtcatcaaagttgttggttgcccggtaggcaagcaggccgatcagcaccatcccgaaaatgtacaccaggaaggtcaccagcataggtgtgctcattgtcatttaattctccactttcattattattcgcgtttcgctccggccaagccggcgccggtaaacccacgcgcaatgcatttcactggccgccgcgccggaacgtgacgcagcctgcgagcgagtgcaggtaaaatagtttctgcccgtaattgttgaccgtcggttatcctagatgagcctttcatcaaccaacaagatatttaacaacaaagttacacaaagtttaccctgcgtcacatttgccgggctcaaaggttgcactcacgacaagcaaaatgagttgcaccttgccattacccttatataccgcagggtaaagcgcctgcgacgtaataaaccccgccgcattcgctcaataacgcaacattcatgccaactgcccgtgttaaaaaatcgatgaaactcacacttcgctcatcagcctgatttaacaaggttgcacaaagttgcaacatgcaggatattgtctgcattcttaacccacacatctcacgaacctatcccaacaggctttccggcctgctgtttgtctagcctgatgggataggttctaaacacaggagttggacaggcatgggcactaccacaatgggcgtgaaactcgacgaggcaacacgcgaccggatcaagagcgccgcgcagcgcatcgatcgcacgccgcactggctcatcaagcaggccatctttaattacctcgagcgtctcgagagcggtaccgatatccctgaaattccagcgctggccgcagcgggccagcctgaagcggacgacattatgccgcaagcgcaggaagagtcacaccagccattcctcgatttcgccgaacaaattctgccgcagtcagtcacccgcgccgccatcaccgccgcctatcgccgcccggagaccgaagcggtgccgatgttgctcgaacaggcgcgattacccgccgatcttgcacaggctactcataaaatggcctatggcatcgccgagaaattgcgtaaccaaaaaagtgcaaacggccgcgccggcatggtgcaaggcctgctgcaagagttctccctctcctcgcaggaaggtgtggcgctgatgtgcctggcggaagcgctgctgcgcattccggacaaaccgacccgcgacgccctgatccgcgacaagatcagcaacggcaactggcattcgcacctggggcgcagcccgtcgctgttcgtcaacgccgcgacctggggcctgctgtttaccggcaagctggtgtccacgcataacgaagccaatttgtcccgatcgctgaaccgcattatcagcaagagcggcgaaccgctgatccgcaaaggcgtggacatggcgatgcgcctgatgggcgaacagttcgtgaccggcgaaaccatcgccgaagcgctggccaacgcgcgcaagctggaagaaaaaggcttccgctactcctacgacatgctgggcgaagccgccctgaccgaagccgacgcccaggcctacctggtttcctaccagcaggcgatccacgccatcggcaaagcctccaacggccgcggcatctatgaaggccccggcatctccatcaagctgtccgccctgcacccgcgctacagccgcgcgcagtacgaacgcgtcatggaagagctttacccgcgcctgctgtcgctgaccctgcaggcacgtcagtacgatatcggcatcaatatcgacgccgaagaggccgatcgcctggagatctcgctcgatctgctggagaaactgtgcttcgagccgcagttggccggctggaacggcatcggcttcgtgatccaggcctatcagaaacgctgtccgttcgccatcgacgcggtgatcgacatggcgcaacgcagccgccgccgcctgatgatccgtctggtgaaaggcgcctactgggacagcgaaatcaaacgcgcccagatggacggcctggaaggctacccagtctacacccgcaaggtgtacaccgacgtttcctacctggcctgcgcccgcaagctgctgtcggtgccgaacctgatctatccgcagttcgcgacccacaacgcccataccctgagcgccatctatcacctggccggcaacaactactaccctggccagtatgaattccagtgcctgcacggcatgggtgagccgctgtacgagcaggtggtgggtaaagtggccgacggcaaactgaatcgcccttgccgcatctacgcgccggtcggcacccatgaaacgctgctggcttacctggtgcgtcgcctgttggaaaacggcgccaacacctcgttcgtcaaccgcatcgccgacgccaccctgccgctcgacgagctggtggccgatccggtcagcgccgtggaagcgctggcggccagcgaaggtcaaattggcctgccgcatccgcgcatcccgctgccgcgcgagctgtacggcgagaaacgcgttaactccagcggtctggatctgtccaacgaacagcgtctggcctcgctctccagcgccctgctcaccagcgccagccatccgtggcgcgcggaacctatcatcgacgccgaattggatcagggcgtggagcagccggtgatcaacccggccgagccgggcgatgtggtcggctacgtgcgtgaagccaccgaaggcgaagtcagccgcgcgctcgacgccgccgcggccgccggcccaatctggttcgctacgccgccgacggaacgcgccgcgatcctcgaacgcgccgccgaactgatggaaagccagctgcaaagcctgctgggcattctggtgcgcgaagcgggtaaaaccttcaacaacgccatcgccgaagtgcgtgaagcggtcgacttcctgcactactacgccggccaggtgcgcgacgacttcgccaacgacagccaccgcccgctgggcccggtggtttgcatcagcccgtggaacttcccgctggcgatcttcaccggccaaatcgcagccgcgctggcggcgggcaacagcgtgctggccaaaccggccgagcaaacgccgctggtggccgcgcaggcggtgcgcatcctgctggaagccggcattccgcaaggcgtgctgcagctgctgccgggccagggtgaaaccgtcggctcgacgctggtcaacgacgcccgcgtccgcggcgtgatgttcaccggctccactgacgtcgccggcattctgcagcgcagcatcgccggtcgtctggatccgcaaggccggccgacgccgctgatcgccgaaaccggcggcctgaacgccatgatcgtcgactcttccgccctgaccgaacaggtggtgaccgacgtggtggcctccgccttcgacagcgccgggcagcgttgctccgcgctgcgtatcctgtgcattcaggaagacgtggccgagcacacgctgcaaatgctgcgcggcgcgatggccgaatgccgcatgggcaacccggagcgcctgtccaccgacgtgggcccggtgatcgacgccgaagccaaaaccggcatcgaacgccacatccaggcgatgcgcgccaaaggccgcaaggtgtaccaggccgccaaaggcagcgcgcaggatgaaaaagagtgggcgcgcggcaccttcatcaagccgacgctgatcgaactcgacagcttcgacgagctgcaaaaagagatcttcggcccggtgctgcacgtggtgcgcttccagcgcaacaatctggacgcgctggtcgatcagatcaacgccgccggttatggcctgacgctgggcattcacacccgtatcgatgaaaccatcgcccgggtgaccgaacgcgccaaggtcggcaacctgtacgtcaaccgcaacatggtcggcgcagtggtcggcgtgcagccgttcggcggcgaaggcctgtcgggcaccggcccgaaagccggcggcccgctgtacctgtaccgtctgctggctaaccgtccggacgacgcgctgcaacgtacgctgcaccgccaggacgaagagcgcccgatggaagccaccgcgcggccgcagctgttgggtgcgctgcaatcgctggagaaatgggcggtcaccagccagcacggcgaactggcggcattggcgcaacgttatgcggaactgggccagggcggcaccgtacgtccgctgccgggcccgaccggcgagcgcaatacctatgccctgctgccgcgtgaacgcgtgctgtgcctggcggataacgaaaccgacgcgctgatccagctggccgccgtgctggcggttggcagctgcgcgctgtggccggaagcggaactgcagcgcaatctgttccgccgcttgccgaacgatgtgcaggcgcgcatcgccttcagcaaagactggcagcaggacaaggtcgagttcgacgccgccatctaccacggcgatgccgaccagctgcgcaccctgtgcgagcagatcgcccagcgcggcggcgccatcgtctcggtgcagggcttcgctcacggtgaaaccaacatcctgttggaacgcctgctgatcgaacgttcgctgagcgtcaacaccgccgccgccggcggtaacgccagcctgatgaccatcggttaacgcatcctcaaggcggcaatacattgccgcctgatttgctaaccgctacgcaaaccctgcacttgtgcagggttttttattgtccgcagcccggtcagccgttagcgtattaatcttcttgcctgagagtgtgtatggtgtgtagattaaggacaataacatcgtgaagagttcagaactgattgcgctgctggaaagccacggttgggtattgcggcgggtaaaaggcagccaccatcaattcaaacatcccgattttgcgctgatcatcaccgtgccgcatccaaagaaagatctcaagctgggcacgctgcggcagatacttaaagacgcggggttaagtgcgcttcacatcgccacgcgttaacaggagagaccatgttttatcccgcttatatccatacagaatcaaacggcagcgccagcggtttctttcccgacgtccctggctgctacttcgccggcaccagcctggacgacgcttttgccgatgcccaaagcgcactggacgcgcactttgagttgttgagcgaagacaatcaaccgctaccgcgcccgcatgccgtcgcagcccatcttgccaaagatgcgggatccttcgagggaggacaatggctattggtcgctatcaatatggataaatttgacggccgagccgaacggattaacatcacgttgccccatcgcctgttaagtcgcattgactctctggttcggcaacatccgggatacggcagccgcagcggatttctcgctgccgccgcgcgcaatgaattgttgaaagcggagtgaatgcagtcgggggaaacgcccccgacgccttattgattccggaacttgtcgaggaattgctgggtgcgctgatgctgcggattggcgaaaagcgctttggccgggccctgttcgacgatgcggccgtgatccataaagataacccgatcggccacgtcgcgggcgaagctcatttcatgggtgacgatcaccatggtgcgtttctcttccgccagtgaacgcatggtattgagcacttctcccaccagctcgggatcgagcgccgacgtcggctcatcgaacaaaatcacctccggctgcatcgccagcgcgcgcgcgatcgccacccgctgctgctgcccgccggacagccgacgcggataagccgcctctttgccgctcagccccaccttggccagcaacgcgcgagcgcgctgttcggcgctggctttcgcctcacctttaacgataaccggcccttcaatgatgttttcgagcaccgaacggtgcggaaacaggttgaagttctggaacacaaaaccgacctgctggcgcagcgcgcgcacctgatttttctgtttgctcaacggcttgctgccatcgatcaggatatcgccgacgcgaatggtgccggaatccggctcctccagtaggttgatgcagcgcaacaaggtggttttccctgagccgctcgggccgatgatcgccaccacttcaccggcatccaccgccagatcgatcccatgcagcaccgtctgacctttgaactgcttggtcaattgcttaacttcaatggcactcatgcgttactcctgatcctggcgattaacgtgggcttccagacggttttgcagtgcggaaagcagggtcgccatcacccagtaaatcagcgatgccgccaggtacatggtgaacacttccagcgtgcgcgaggtgatgagctgcgcctggcggaacagttccggcacctgaatggtagcggccagcgaggtgtccttcaccaggccgataaaactgttgcccagcggcggcaaggcggtgcgcgccgcctgcggcaggatcacccggcgcagggtttgccaacgggtcatgccgatactggcggcggcttcccactgccctttgtcgatcgacgaaatcgccgcgcgcagcgtttctgaggtgtaggcggcggtattgagcgacaggccaatcagcgccgccgggaaaggatcgaattcgatgccgaactgcggcagaccgtaatagatcataaacagctgggcgatcagcggcgtgccgcggaacagcgatacgtaaatgcgcgacagccatgacagcggccaaagcggcgaaaggcgcatcagcgccagcagaaaacccagcaacaggccgaacgccataccgcccaggctaagctgcagcgtcagtatggcgcccttcaataaaaatggcgctgaatccagcgccagttgaatactttcgtgcattatttagttacgtccgcgccaaaccatttctcggagatcttcgccagcgtgccgtctttttgcatctcggcgatcgcctggtcaatcgcggccagcagctctgggttattcttgcgcagcgccacgccggactcctggcgggagaatgccgggccggccaccgccagcgtatcgccggttttcttcaccagatccagcgccgccaggcggtccaccagaatggcgttgatgcggccgacgcgcagatcctgatacttggtcggatcatcgtcgtaagtgcgcacgtccacgccctgcacattctcgcgcagccattgctcatagttggtgcccaggccaacgccgacctttttgcccttcaggtcatccggcttggtaatggtgccttcgttgccctttttcaccagcgcctgaatgccggaaacggtgtaaggggtggagaaatcatatttcttcttgcgctcatcggagagcgtcacctgattgatgaccacgtcgatgcgcttcgaatccagcgaagccagcataccgtcccatttggtcgggttcagcttggctttcacgcccagatgttgcgccagcgcgttggcgaaatccacttcgaaaccggtcaatttgccgtcttccccctggaaactgaacggcggataagtaccttccagcccgacgatcagcgtgccgcgctgtttcacctgctgcagcaggttatcggcggcgtaggtttgcgtcgtcacaccggcggccaacgcaatacccaccacgcccaacaaccattgacgacgaactttcgcaaacatcataaacacccctgtatgttgtttatcttttttgatatcagcactttaacagtgcaaccgcccgcataaaggaatataaccttataaatatagttcaaaatggaataacacgcggtgtttacacctgcggatggtaggcgaacagcgccggtgcaccgccggtgtgaacaaacaggatgggaccttcgtcgcggaagcgccgctgggcgatgccgtcgatcaaaccggccatcgctttgccggtgtacaccggatccagcaataccccctcttgctgcgccagcaactgcaccgccgccatgccctcttcgttcggcatgccgtactgcggcgcgaagtaatcatcccacaacgcgatcggcgccagtttgtcaatattcagcgaacaggccagggctttctggatttgttccaccttcggcaactgatcgatcacggtgcgcgagacggtcacgccgatcaactcggtttcgggcagcagctgctgcagccccaccgccagcccggcgtgggtgccggcgctgccggacgccaccaccaccgaactgaacgccacgttgctgcgttggctctgttcggcgatttccaatgcgcactgcacgtatcccagcgcgcccagcgcattggagccgcccaccggcaccacgtaaggccggaagccctgcgcctcgaggcgcgtcgccagttccgccagttgctgctgcggatcgtgcagcgcttcgcacattaccacttcggcgttgaacaggccgagcaacagacggttgccgttggtcaggtagttttccgcgcgggtatcgatcgggttttccagcaaagcgacgcagtgcaggcccagtttcgccgccaccgccgccgtctggcgcacgtggttggattgaatggcgccggcggtgaccagcgtatcggcgccttgccgtaacgcatcggcggccaaaaactcaagctttctcagcttgttgccgcccatcgccataggcgtgacatcgtcacgtttaaggtaaatttcacggccgaggtaatcggagagacgggacagtttttccagcggtgtggcgacgccaaccagatccagacgcggaaattgcgccagttgttgttgcaggttcactacttccccccagggaatcgaatatcaacatctgataaccgatagatttagcagatgtgaactgaataatcatcctttatcacgggggaaacagcagaccccggcccagcggccggggaaagtctcagtagctgcgctgccaggcgagatactgatcgtacttgcgcagcgcaatgcggtagttgttgtgcgccgcggtaggcagatcgtcgatgatgcgctgatgactggcgctgttggcgaatttgtccgccgggtaattccgcgccaccagcatttcatccagccggcgcagccgcaccacgtactcgcgaatggtgctgtggctcatctcggtctgttcgaacagatactgcttgaacgccataatgtcgaaataactcgggtggctgttgcaggaaatctcgctgcaaaagcggcacagcgcggtcagctcgtgctgcacgttttgccagaccgcatcgtcgatcggctgatccatgcgcgcgatggcttctttattgattatcttgccgcgaaacaccagcgccatgcggtccaacagtttgccgcactgggagcaatgggtctggctgtgcttgtagtctttcaggtaacggctaagcggccgtttcttcaacagtattcctggcataaggggcagtccgattgtcgcatgagtcatcgagttgggggcggcgctccgccgtcaggtatcgttcgccagccgcgcgcgcagccgtttgatcgcctgactgtgcagttggctgacgcgggattcccccacgtccagcacggcgccgatctctttgagattcaactcttcctggtaatacagcgtcagcaccattttttcgcgctccggcaacgcctcgatggcgtcgatcacccgctggcgcaggctgccttccaacaggtgatgcagcgggttggcctcttcatgcccttccagcatcggttccgcgttctcgccatgctcctcgcgccattcgtcgtaggagaaaagctggctgttattggtgtccaacagaatttgacggtactcatccagcgagatgttcagcgtctgcgccacttccgtctcgctcgccggacggccgtaacgctgttccagttgccgcatcacctgcgcgacctcgcgcgcgtggcgccgcacgctgcgcggcacccagtcgcggctgcgcaactcgtcgagcatcgcgccgcgaatgcgctgcaccgcataggtggtaaaggcggttccctgtagggcgtcataacgctcaacggcgtttaatagcccgattcccccggcctgcaacaggtcgtcaagctccacgctggcgggcagcctgacctgcaggcgcaacgcctcgtggcgcactaacggcacgtagcgcaaccagagagaatttttgtccatcacgccttcggcggtatacagatcgctcactatgtcttaaacctgcggataagagagtcagcgctattatgcgtagggggcggaatgccaatcggctgaacagtcgcacaaaacgggctttatttgcgccatgtaataaccgcgcggtgcgcgagcataaaaaaaccccgccgaagcggggtttctttgcgacagttaatcgggagagacgattaacgcagcagggacaggacgttctgagtagactggttagcctgtgccagaacagaggtgccagcctgttgcaggatgttggcgcggctcatgttggacacttcggtcgcgtagtcagcatcctggatacgggactgagaagcggacaggttgttcacggtgctgttcaggttgttgataacagaatcgaaacggttctgtaccgcacccagggaagaacgcagaccgtcaacctgagacagcgctttgtccagggtagccagcggatcaggaatgtccactgcagtggtgcttgcagcaaatttcacggtatcagctgcaccgccagtacctgcagtgaaggttggagtcgctgaaacgtaagattttttaccgtcggtggcagtggtttcgaccatgtagatggttttgccatctttatcagaacctgataccagcttctcattcgccttcagaccagatgcgtcaactttagcatcgccaatggtacctgcgttgtcatacttgatagttgcgccatcagcgatctgagaaccaactttgttgcctttggtcgtcacattaaaggtatccagacccagctctttagcgtcgatctttttcagatcgatatcgatggtttcaccgtcgttagcgccaacctggatagtcagtttctgatcgctgctcagcactttcacgccgttgaagtcagtctgctcggagatacggttgatttcagacagacgctgagtgatttcgtcctggatggatttcaggtcgctggtggagttggaaccgttctgcgcctgtacggtcagacgacggatgttctgcaggttgtcgttaacttcgttcagtgcgccttcagtggtctgcgccagagagataccgtcgttggcgttgcgggaagcctgagtcaggcctttgatgttcgcggtgaaacggttggagatcgcctgacccgcagcatcgtctttcgcgctgttgatacgcagaccggaagacagacgctcaatcgcagtgcccagagaagactgagatttgttcaggttgttctgcgccatcagagacaggctgttagtgttgattacttgtgccattgtttgctttccttacgagtcagttgcgttcttcgcaacacggttaaaaggttcgggcttgtttgcccacggcgtcaaccaccgtcccctcaggtatcggccctcccctaacaacctttagcaattttttaaaattttttgtgcccgttgcaatggcggaaataacgcgctttttccctcctctattgcgccatcgtttttttgtttttttcggtaaactttttcaccactgggccgataacgcgtaaagcgaataaagtcataatcaaggagaattactcatggcaacgatcagttcattaggtctcggctcaggactcgacctcaatggcttgctggataagctgaccaaagcggaacaacagcgcctgaccccttacaccaccaagcaatccagctacaacgcccagctgaccggttacggcacgttgaaaggcgcactggaaaaattcgacaatctcagcaaagagatggcgaaagaagatttcttcaaggccaccaccgccacagaacacgacgccttcaagatcaccaccaacgccaaggcggtgccgggcaactatgtggtggaagtgaacaaactggcgcaggcgcaaaccctgaccacccaggcgaaagtcagcgaccagggcgctaagttgggcgctgaaggcgtgacagaccgctccctgaccattaccgccggcaacccgccgaaagaaaccaagatcccgctgagcgacgatcaaacctcgctggttgagctgcgcgacgccatcaacggcgccaaagccggcgtcaccgccagcatcatgcgcgtcggcgacaacgactatcagttggcggtcagctcctccaccaccggcgaaaacaacaagatttctctgcaggtcgataacgacgaccaactgggcgatatcctgaactacaacgccacccgcggcaccggcaccgccatgaagcagacggtcgcgccgcaggatgctgagctgacggtgaacggcaccgctatcaagcgcagcaccaactcgatcagcgatgccctgcaaggcgtcaccatcgatctgaaaaccaaaaccaaaaccgatgaaccgcaacacctggtgatcagcaccaacaccgccggcaccaccgacaagatcaaagagtgggtcgacagctataactcgctgctggacaccttcaacgcgttgtccaagttcaccccggtgaaaactggcgaagcgccaaacccaaccaacggcccgctgctgggcgacaacaccctgcgcggcattcagtcgtcgatcaaaagcgcgctgagcgcagcccaggacaacccggagttaaaaggcctgggcaacctcggcatttccaccaacaccaaaaccggcaagctggaaatcgacagcgccaagctgaagaaagcgatggatgagaagccggatcaagtcagcaacttcttcgtcggtaacggcaaagacaccggcatggccaccgagatccacaacgagatccagagctacatcaaatccggcggcatcatcgagaactcgaccaaaagcatcaacaccaacctcgatcgcctgaacagccagatcacgacggtcaccgccagcattcagaacaccatcgatcgttataaacaacagttcgttcagctggataccatgatgtcgaaaatgaacggcaccagtaactatttggctcaacagttcaagtaaccctttaacaaggtaaagaaaacagcatgtataaccgtagcggcactcaggcctatgcacaggtcagtctggaaagcggcgccatgagcgccagcccgcaccagttaatcgtgatgttgttcgacggggcgctcagcgccctgcttcgcgcacgcatcctgatgaaccagggcgatatcgccggcaaaggcatggcgctgtccaaagccatcaatatcatcgacaacggcctgaaaagtggcctcgaccctcagcagggcggcgagatcgccgaaaatctggcggcattgtacgactacatgaagcgtcgactgatgcaggccaacctgcacaacgacgaagcggcgatcgccgaagtggttaaactgctggaaaacatcgccgacgcctggcgccagatcggccctaactaccaaccttcgcaggacgccgtgtaatggaacgtcaacagcagctgttagccgcttatcaacaaatttatagcctgagcagccagatgatcgcgctggcgcaaaccgggcgctgggaggagctcgtcgagctcgaattcgcttacgtgacggcggtggagaaaaccgccgcctttaccgggcaagccggcccgtccatggcgctgcaggagatgttgcgcaataagttgcaacagatcctcgacaacgaaaccgagctcaagcgtctgttacagcagcgaatggatgagctgaagatgctgatcgaacagtccacgcgccagaacgtggtcaacaatacctacggccagtttcatgatcgtgcgctgttgctgggggaaccacaggtccgataagatcgacaatactgacgaaaatggattaaatagcactatgcgctattaccctcgggttacgttaggatattaatctatggcatttgaattattcagtttatgggtaattggtaaaatgcgcgcttcgagcctggctctcactttaatggataaacatcatcccgacacggacgttttctgttcagcaggaaattgatttttgatagataaaacacgccgctgtgtttcacggcccatggaaaaatgttgctccaacgctgatcaaagcgtaaagatattctcagataatggctgcgaaatgaatatcgatggaacgtacaattaatctctgtcctggaattggcgcctcagcgcacatcattcagcatactgaattattattcccttcagtctattttgagcaaccacatctgtatctgatacaacaaggccataagcgcgtacgctggcaacaacacgaagtggtcgctcatcccggcgagctgttgattatcgacggcgggcaaacggtggacattattaacggcccgtccgaagacggcgtattcagctgccagttgctgacctgcgatcccctgttgctcaccgtccaacctccggcggaggaaacgccggcgccgatgccgttcgaggccgtcctggcgctgcgcaacctgccctgcgccctcaagcacagttttgaaaccaccggtctggcgctgacgctgcggcaacgctttcccaccatcatcgtgcggcacaaaatgctggaaattctgctgtggctggcccaattcggcattcgctttattcacaacgaagccaaggatctgacgcaacgcgtgcgccgctgcctggcgaccgacccgcacagcatttggacggcggccaaagtcgcggaaagcctgtcgatgagtgaagtgatgttgcgccgcaaactgtcgatggaaaataccgcattgcgcaatctgatgatcgacgtgcgcatgagtagcgcgctggccctgctgcagtcgaccgactggccgatctccgccatcgcgcaacatgtgggttatgaaagcgcatcgcgtttcgccgaacgttttcgcaaacgcttcggtttcgcgcctaccgccattcgcggccatcaaaggattatggaacccggttctcagggcgttgaggcgatggtcgccggagaaacataaatagacgcgcaacaaaatggctttatttaacacaagtccctaacggttgtaacaccactgagatacgctaagcaacgcccatccgccgaacagcgaattaaatgatgcgtaatgaaaagcgattattttctctggcaataattttgttggggttgtggctgttagccttactgaatgaagaagagatgatgcgtttactggccgcacaataaaacggccaggctttttatcgtctggtcagacttcagtccagtttaaccagaacgccaattaataccgccagcagcgccaacattaaaatactgatcagacgccatctggattcgcttttcgtgctcattgaccggcctcgaataataaccctactaatcacgtcataataaacggtcacctgcgcattcaataaacctgacagcaccattttctgccctctattcggtacattagtcggttgtggaaccggccattagcgatgcgatacccacggtgccgcaagcgccaattttcccggcagctccgccaccagcttgtctaccgccagccgcaccttgagcggctggtaaggcatatagggccacacgacgttcaccgggaaactgaggctggactcaccgcgcatgatctccaccaacgtccccgccatcaagcgctcgcgcaccagccactccggcagccaggcaatgccggcgccggcggacaccgcatcgacgatcccctgcatgtcatccatcatcatcttggccggtggcctgaacggccgcagctcgccgttttcaccgcgaagctgccagggcagcacggccccggcatgcagataccccaccgcctgatgtcggcttaacgcctctaccgttctcggttcaccgcagcgctgcagataatcgggcgaggcgcacagcagcatgccgtgttcgcccaagcgacgggcaaccaggctgccgctgtccgccagctcgccaatgcgcaccgccagatcgaacccctcgtcgacgagatcgatcctgcggtcgctgaatgaaatctccagcgtcagtaagggatgctcattcgccagcgccgtcaacacgggcgcaatgcacaaatggccgaacagcaccggcaccgagactctgagccggccgctgacctgcatcttgccgctgtcgagctggttttccgccgcctgaatgtttgccaacgcctgccggcagtgctcatagtacagcgccccttcatccgtcaggctcaggctgcgcgtggtgcgcataaacaacatcacgccaagccgagcctcgagacgcgacacgattttgctgaccgcagagcgcgtcagatgcagtttctctgcggcggcggcgaaactgccgccttccgctacggcaacaaaggccggcagcgcactcagatcgcttttcatcttaatgttgccaatatggaatcaatttagtgaaaaactatcaccactggtgaacctcaagcaatgataacctgcagtcattccgaatccccggtgaaaaccacagatgaccgtcagaggacagcagcatgaaaaaaatactggtactcaaatccagcattatgggaaatgactcgcagaccaataacctgattgaccgctatctggcggcgcgtaaggcgaaaggacacgaagatcggatcgtcgaacacgatctgactgcattggatctgccggtattggacggcgagctgttcggtgcgttgcgcggcgcggaaaacatcagcccacgcgccaaagcggcggtggcgctctccaaccagctgattgccgaactgaaagagagcgatctgctgctgctcggcgcgccgatgtacaacctcaacgtcccgacccagttgaaaaactggttcgatttggtggctcgcgcccggatgaccttcaactataccgccacctacccggtggggttggtggaaggcgtcaatgcgctggtattcagttcacgcggcggcatgcacgccgggcatccgacggatgccgtaacgccctacctgcgttcggtgctggggctgatggggatcggcgacgtgcaatttatctatgccgaagggctggacatgagaccgcacggccgcgatcaggggctggcgaacgcccaccagcggatcgcggaattggcgggctgaagcaaatgcacggcagcattgatttgttataatataacaaatatgataatcgcgttgacgccacctcgagcggctgtcgacgctcctacatgacataaatgttttatcgcaccttcagccagctatttcgatagctggttttttttcctcggttggcgctgcggcttcagcattgtcggactggccgtcactctaaggtaacagcgccgagccaaatttcaccgaaaaatagtcggcacgttcatcacaccggcatattcatgatgtcctggtaggccgccaccagcttgttgcgcacctgcacgcccagttgcaaagagaccgacgatttctgcagatcgaccatcacatcgttcaggctgatgcctggcgcgcccagctcgaagtcctgcgcctgtttgcgcgccgtttgctgggtctcgctgatcttgccgagcgccgcggtcagttcgctggcgaagctgacgccttgcggcgccgcattctgccccatcttgccggcctgaaccgccatggtctgcatctgctgcagtaccccttcaatgccctgaatcgccatctggtcctcaatcctctcgtctcgccgggtgacgttttcaccctgcacttctccaatgatgcacaccctagcacagcgttttcggacctaaagcggttaattaactgcaaaaaacccggcttatcgggcaatcggaattgtctgataaggcgaataatggcctgcccagaaatgggagcgccgctatttagaagatatgtgtatcagggagtctgttttgtcacacaacgctaaccataccgttcatcagcctggcagggagctgctcagcggcccgtacgggatcgtgagcgccattgaaggacgagacctaaaatgagtgcttcgataaccgccggcgaaagccgcgacaacggcctgcaggccatctggaaccgtctgcgcgccaacccgaaaattccgttgctggtcgccgcttccgccgcgatcgcgatcgtcgtcgcgctgctgttgtgggtgaaaagccccgactaccgcgtgctgtacagcaatctgaacgaccgcgacggcggcgccatcgtcacccagttgacgcagatgaatatcccttaccgctttgccgagaatggcgcggcgctgctgatcccggcggaaaaggtgcatgaaacccgtctgcgcctggcgcagcaagggctgccgaaaggcggcgccgtcggcttcgaactgctggatcaggaaaaattcggcatcagccagttcagcgagcagattaactatcagcgcgccctcgagggcgagctgtcgcgcaccatcgaatcgctggggccggtgcaaaacgcccgcgttcacctggcgctgcctaaaccttcgctgttcgtgcgcgaacagaaatccccttccgcctcggtaacgctcaccctgcaacccggccgtgcgctggacgacggccagatcaacgccatcgtttatatggtgtcgagcagcgtcgccggcctgccgccgggcaacgtgaccgtggtcgatcaggccggccgcctgctgacccagtccgacggcaccgggcgcgatctcaacgcttcgcagctgaaatacgccaacgaagtggaaaacggcttccagcgccgcatcgaagcgatcctcgccccggtggtcggcagcgccaacgtgcgtgcgcaggtcacggcgcagatcgacttcgccacgcgcgaacaaaccgatgaacagtaccaacctaaccagcagccgaataaagccgccatccgctcacagcaaaccagcctgagcgagcagatcggcgggccgcaggtcggcggcgtgccgggcgcgctgtccaaccaaccgagcgctccgcctacggcgccgattgaaaccgccaagccggcggcgggcaataacgccaacgccaccgcgcaaaacgccgcgaccacccgcagcgcggcggccagcggcgtgccgcaaaatacccgtcgcgacgcgaccaccaactacgagctcgatcgcaccatccgtcatacccagcaaaaagccggcaccgtgcagcgtctgtcggtcgccgtggtggtcaactacctcggcgcggataaagacggcaaaccgcagccgatgagcaaagaacagctggcgcagatcgaagcgctggtgcgtgaagcgatgggctactccagcagccgcggcgataccctgaacgtggtcaacacgccgtttaccgacgctcaggtgaccggcggtgaactgccgttctggcaaagccagtcgtttatcgatcgcctgatcgacgcgggccgctatctgctggtgctgctggttgcctggctgctgtggcgcaaactggtgcggccgcagctgcaacagcgccaggcggcgcaacaggccgccctcgccgccgccaacgcccctgccgccaaagcggccgacagcaacaaaccgagcaacgaggagctggcgcagcgtcgcaaatcgcagcagcgcgtcagcgcagaagtccagagccagcggatccgcgatctggctgacaaagacccgcgcgtggtcgctctggtaatccgccaatggatgagtaacgagatatgagcctgaccggaaccgacaaaagcgccatcttgctgatgacgctgggtgaagatcgcgcggcggaggtgttcaaacacctctcctcgcgcgaagtacagctgctgagcggcaccatggccggcatgagccaggtttcacacaaacagctcggcgaaatactgaccgagtttgaagacgacgccgagcaatacgcggcgctgagcgtcaacgccagcgactacctgcgctcggtgctggtcaaggcgctgggcgaagagcgcgccgccagcctgctggaagacattctcgaatcgcgcgagaccaccaccggcatggaaacgctcaactttatggagccgcagagcgccgccgatctgatccgcgacgaacacccgcagatcatcgccaccattctggtgcacctcaaacgcggccaggcggcggacatcctggccctgttcgacgaacgcctgcgcaacgacgtgatgctgcgtatcgccaccttcggcggcgtgcagccggcggcgttggcggagctgaccgaagtgctgaacaacctgctcgacggccagaacctcaagcgcagcaaaatgggcggggtgcgcaccgccgccgagatcatcaacctgatgaaaacccagcaggaagaagcggtcatcgacgcgatgcgcgaatacgacggcgagctggcgcagaagatcatcgacgagatgttcctgttcgaaaacctggtggaagtcgacgatcgcagcatccaacgcctgctgcaggaagtggaaggcgagtcgctgctgatcgcgttgaaaggcgccgaacagccgctgcgcgagaagttcctcaagaacatgtcgcaacgcgccgccgacatcctgcgcgacgacctggcaaaccgtggaccggtgcgcatgtcgcaggtggagaacgagcagaaagccatcctgctggtggtaagacgcctggcggaaaccggcgaaatgatcatcggcggcggcgaggacacctatgtctgatcgcattaacaccctgccctggcagccctggtcgctcaacgatttgggcgaacagaaaccggctctcgagctgccgccattgccggatctcgaacttgacgatccgtcgccggacgcgcaggccgaattgcagcagcagctggcgacgctgcgcctgcaggcggagcaacagggccagcaactgggctatgccgacggccagcaaaaagggtacgaggccggttttcagtccggactggaggaaggccgtcagcaagggctgctggaagcgcagcagcagcaacagccgctgaccgcccactggcagcagctggtcaccgaattccagcacacgctggacgcgctcgacagcgtgatcgcgtcacggttgatgcagctggcgctgaccgccgccaaacaggtgctgggccagccgccggtgtgcgacggcaccgccctgctcgcgcagatccaacagctgattcaacaggagccgatgttcaacggcaagccgcagctgcgggtccacccggacgactacccgcgcgtcgagcagcagttgggggttaccctcagcctgcacggctggcgcctgctagcggacggtgaactgcatccgggcggctgcaaggtcagcgccgaggaaggcgatctcgacgccagcctggcgacgcgctggcatgaactgtgccgcctggcggcaccgggagaagtctgatgaccgcgcgtctcggccgctggctgagctctctggatacgctggaaaaacgcatcgcccgcgcgccgacggtgcgccgctacggtcgcctgacccgcgctaccgggctggtgctggaggccaccggcctgcagctgccgcttggcgcgacctgcctcatcgaacggcacgacgccggtgaggtgcaggaagtggaaagcgaagtggtcggcttcaacggccagcggctgttcctgatgccgctggaagaagtggaaggcatcgtgccgggcgcgcgggtttacgcccgcatcgcgccggaaggccaaagcgccggcaaacagctgccgctcggcccggccctgctggggcgcgtgctggacggcagcgccaaaccgctcgacggcctgccctccccggaaaccggttaccgcgcgccgctgatcaccgcgccgttcaatcccttgcagcgcacgccaattgagcaggtgctggacgtgggggtacgcaccatcaacggcctgctgaccgtcgggcgcggccagcgcatgggcctgttcgccggctccggcgttggtaagagcgtgctgctcggcatgatggcccgttataccaaggcggatgtgatcgtcgttggcctgatcggcgaacgaggccgcgaggtcaaagactttatcgagaacattctcggtgccgaaggccgcgcgcgctcggtagtgatcgccgcaccggcggacgtgtcgccgctgctgcgcatgcagggagcggcctacgccacccgcatcgccgaagatttccgcgatcgcgggcagcatgtgttgctgatcatggactcccttacccgctacgccatggcgcagcgtgagatcgccctggccatcggcgagccgccggcgaccaaaggctatccgccttcggtcttcgccaagctgcccgccctggtggagcgcgcaggcaacggcatcagcggcggcggctccatcaccgctttctacaccgtgttgaccgaaggggacgatcagcaagacccgatcgccgactcggcgcgcgccatcctcgatggccacgtggtgctgtcgcggcggctggcagaggccggccactacccggctatcgacatcgaagcgtcaatcagtcgcgccatgacgtcgctgatcgacgaagagcattatcgccgggttcgcaccttcaaacagatgctggccagctatcaacgcaaccgcgatctgatcagcgtcggcgcctacgcggcgggcagcgatccattgctggacaaagcgatgacgctgtatccgcagatggaagcctacctgcagcagggtatcttcgaacgcagcggctatgatgaagcctgtcaacagctgcagcagttgattgtttaacgtcacagaggcgcagagcgatgaaatcacaatcccccctgattaccctgcgcgatctggcgcaggatgcggtggagcaagccgcgcaacagcttggccaggtgcggcaggcgcagcaggcggcggagcagcagctgtcgatgctgctcaactatcaggacgaataccgccagaagctgaatcatacgctctgcgacggcatggacagctcacgctggcaaaactaccagcagtttatcggcacgctggagcaggccatcgaccagcaccgccagcagctgctgcagtgggggcagaaagtggatcacgcggtgaagcaatggcaagacaaacaacagcggctgaacgctttcgaaaccctgcatacccgcgcaatgaacgcggagcagcagcaggagaacaaacgggatcaaaaattgatggatgaattcgctcaacgcagcgcacaaaggaatatcaacccatgaatctgaacgccctgcccggcctggccttacccggcgacgccggcggtctgaccgaactgacctcggcgctggacgaaagccagctgtcgtccgcttttgcccagctgctcggcgcgcgtttcgcgcccgccgccgatggcaaacctcagccggccacgctgagcgcggacgaggagcgcgccccggccctgagccgcaaccagctcaatcagctgctggccaccttcggcgagcgcggcggcctgttgccgaacctgtcagcctcagccgacgcgccttcttctgaagccgttgaaggcgatgcgcccgccgccggcgataaaccggcgcagccgccgatcgtcgccgccaaagagctggatgccgcgacgctgcaggcgctgtacgccatgctgccggccgcgatcgtcgctcaggcgcaaccggccgaaggccaacggtcgctgccgatggaaaacgctgacgaggcgactgcgctgcagcccggcaacggcctgctgaacatcgcggcggccggtgataacaccgccgcgcgctcgtcggcggcccccgccccggcggtgacgggcgcgaaaacgccggctaccgatggcgacaacgctgccgcggcgacaacgcagccgaccagcggtgaacgcgcaaacgccgcacagccgctgccggcgagcgatgcacagcagcaaccgacgctcaatcacgctgtcgccctggccgccgccagcccgacgcaaacggccgccccggccagcgcgctggtaagtgcaccgcctacgccgcagctcaacgcgcagttgggcagcccggaatggcagcaggcgttgaaccaacaggtgttgatgttccaccgcaacggccagcagagcgccgaactgcgcctgcacccgcaggagctgggcgccttgcagatcacgctgaaactggacgaccagcaggcgcagctgcacatcgcctctgcgcacggccaggtgcgtgcggcggtggaagcggcgatgccgcagctgcggcacgcgctggcggagagcggtatcaacctggggcagagcagcgtgggcggcgagtccaccccgcaatggcaacaggcgcagcagcaggcctccaacggccaggggcgttccagttatgctgaacatcatggcgctgacggcgcagccgccgagggcgtcagcgcaccggcggcgctgcagcgtatggccagcgcggtcaacggcgtcgatattttcgcctgagccgccgcaaacgcccaagctggcacccatttgcgcgtctattcaggctattgcacgccacaatagacgcgataatacctttacatgtcatgcgtgcggctttgccgcgcgcgatgcccgccgcctcgccggccgcgggtggaacaacaggaattagatttcgctatgtctcagaactcccttccggcagcaccgaaacgcccccttctggtcatcctgctggtgttgatcagcgtcgtcgcctgtggcgccgcgggctacagctggtggctgctgcaacagcataaaaacggcgccgaaccggccgccgtcaaagaacaaccgccggcggcgccggtgttcatgccgctcgacacctttaccgtcaacctggtgacgccggacaacaacccggatcgcgtgctgtacatcggcctcacgctgcgtctgccggacgaaagtacccgccgccagctgaacgattttctgccggaagtgcgcagccgtctgctgatgctgctttcccgccaggaagcgagccagttggccaatgaacaagggaagcaacagttggtggcgcagattaaggatgtgctcagcccgccgctggttaagggacaaccgaagcaggtggtcagcgacgtgctgttcaccgccttcatactgcggtaatcactatgggcgatagcattctttcacaggcagagatcgacgccttgctcaacggcgacagcgcgggtgatgaacccgaggcggtggtcggcaaagagagcgaggtcaagccttacgatccgaacacccagcgccgcgtggtgcgcgagcgcctgcacgcgctggaaattatcaacgaacgttttgcccggcagttccgcatgggattgttcaacctgctgcgccgcagcccggacattaccgtcggcccgatcaaaatccagccgtatcacgagttcgcccgcaacctgccggtgccgaccaacctgaacctggtgcatctgaatccgctgcgcggcaccgccctgttcgtgttcgcgccgagcctggtgttcatcgccgtcgataacctgttcggcggcgacggccgcttcccgaccaaggtcgaaggccgcgaattcaccccgaccgaacaacgggtgatcaagcgcatgctgcgtctggcgctggacgcctacggcgacgcctggagcgccatctacaagatcgacgtagagtacgtgcgcgccgaaatgcaggtgaagttcaccaacatcaccacctcgccgaacgacatcgtggtcaccacgccgttccaggtggagatcggcgcgctgaccggcgagttcaacatctgcattcccttcgcgatgatcgaaccgctgcgcgagctgttgaccaacccgccgctggaaaattcgcggcaggaagacagccactggcgcgaaacgctggtgaagcaggtgcagcactccgaactggagctgatcgccaacttcgtcgatatcccgatgcggctgtcgaaagtcctgaagctgcaaccgggcgatgtattaccgatagacaagccggaacgcctgatcgcccatgtggacggcgtaccggttctgaccagccaatacggcacgttgaacgggcaatacgccctgcgtgttgaacatttgattaaccctattttgaatgctctgagtgaggaacagcccaatgagtgatcctaagcaaccgtctggcgaaggaaaggaatccgtagacgatctgtgggctgatgcgtttaacgagcagcagtcttcagagaaatccggcgcgagcaccgaaggggtgttcaagtcgctggaagctcaggatgcgctcggcagcctgcaggatatcgacctgattctggatattccggtcaagctgaccgtggaactggggcgcaccaagatgaccatcaaagagttgctgcgcctgtcgcagggctcggtggtggcgctggacggcctggccggcgaaccgctggatatcctgatcaacggttacctgatcgcacaaggtgaagtggtggtggtggccgacaagttcggcgtgcgcatcaccgacatcatcaccccgtccgaacgcatgcgtcgactgagccgctgatgaccgtcgccgcgcccgttaccgtgcaaagcacccaacaacccgccgcgccggccctgccggccggttcggtgttgatgcaggtcagcagcgcgctcggcggcattctgctgctgatcctgctggccggttggctgttccgtcggctggggttcgccccgcaggcgcgcaacaacaaactgctcaacctgcgcgccagttgccaggtcgggcagcgcgaacgcgtggtagtggtggaagtcgacgacaccctgctggtcttgggcgtcaccgcccagcagatcaccccgctgcacaccctgcccgccccgccgaaagacgaaggcgagaccaacgcggcgacgccggcggacttccgccaactgatgcaaaaagttctgaaacgcccggaaaaatcggcatgacctcgactcttcataccctcgtccgccgtccggcggtttggctccctgccgccctgctgctgatcagcccggcggcttttgcacaactgccggggctgatcagccagccgctggccaacggcggccaaagctggtcgctgccggtgcagacgctggtgctgttgacctcgctgaccttcttgcccgccatgctgctgatgatgaccagcttcacccgcatcatcatcgtgctcggcctgctgcgcaacgcgctgggcacgccgtcggcgccgccgaaccaggtgatgctggggctggcgctgttcctgaccttcttcatcatgtcgccggtgttcgacaaggtttatcaggacgcctatctgccattcagccaggacaaaatcgggctggaagtcgcgctggataaaggcgcgcagccgctgcgcgaattcatgctgcggcaaacgcgcgaaaccgatctggcgctgtacgccagactggccaatcagccgccgctggccggcccggaagcggtgccgatgcgcatcctgctgcccgcctacgtcaccagcgaactgaaaaccgccttccagatcggctttacggtgttcattccgttcctgattatcgacctggtggtcgccagcgtgctgatggcgctggggatgatgatggtgccgccggccaccatctcgctgccgttcaagctgatgctgttcgtgctggtcgatggctggcagctgctgctcggctcgctggcgcagagcttctattcgtaacccctgaccggagaaagcgagatgacacctgaatcggttatggcgctcggcaccgaagcaatgaaagtcgcgctggcgctggccgccccgctgctgctggcggcgctcatcagcggcctggtggtcagcctgctgcaggccgccacccagatcaacgaaatgacgctgtcgttcatccccaaaattctggcggtagtggccaccatcatcatcgccggcccctggatgctgaacctgttgctggactacatgcgcaccctgttcagcaacctgcctaccctgatcggctgaccgtgctcactttcgacagcgcccagctcaccgtctggctcagccactatttttggccgctgctgcgcattctggcgctgatcagcaccgcgccgatattcagcgaaaagcaaatcagcaaaaaggtcaaaatcggccttggcgggctgatcgtcatcctgatcgcgccgacgctgcccgccagcaatattcccatcttctccgccgccggcctgtggctggcgattcagcaaatactgatcggcgtggcgctggggttgaccatgcagttcgccttcgcggcggtgcgcctggcgggcgaagtgatcggcatgcagatgggcctgtcgttcgccaccttcttcgatcccagcggcggcccgaacatgccggtgctggcgcgcctgcttaacctgctggcgatgttgctgttcctcagcttcgacggccatctgtggctgatttcgctgctggcggacagcttccataccctgcctgtccaagcgcagccgctgaacggcaacggtttcctggtgttaacccaggtcggctcgctgatcttcatcaacggcatgatgttggcgctgccgctgatctgcctgctgttgacgctgaacatggcgctcggcctgctcaaccgcatgacgccgcagctgtcggtgttcgtgatcggcttcccggtcaccatgaccttcggcatcatgacgctgggcatgatgatgccgatgctggcgccgttctgcgaacacctgttcggcgaagtgttcgatcgattggcggcggtgatcggcggcatgaccttctgatcccctgtgcggccccttccttcccccctcttccgcctgagacaaaatggcaataaaaacgttttcttgggacaaaagcctgagaaacggcttttatccggattaaggttcaaatgtctccggcggcttgaataaataaaaccccgacctagaatagacccggtaacaaaaatatcgccacagcgcgtgagtctccgcagcgataatatacaaccattgattagagaaaaataaaataacgcagccacgcagagttaaatgcgcggcagattccttgcatcttaaataaatgcgtccggtgcccgccggctgcagggagcagcatcgatctttgctaaccataggagcgacatcatgattaaagcgaaaagcaaccgcaaagcacgccggttattcggtttgacccactggaaaagcaacaagtttagagtttccttcaccgagaccagcgatggcggaaaatggaaagtggtgaagaaaaagaaataatcacgcaggacctgtagcaaaattccgggttgcgcctctatccggcttctgcaacgtcattcgacgcggcgccgcatcggcagcccgggacccacactcatcactcgccggcaaaccgtgccggtgtactttattcttaggaagggaataacgcgccacatcaccctggctgctgcgttaaatttaaaaataatgtattaatgatttaatttactcacaccccttatttattcactgacaagaaaaatcgatttcccaccttatttccccagcgttatattgaaaacaaccttgctaccagtacgcggcaagcctcactaaaatataaacggtgtaaatatgaagataaagtttcagctgagtgatttattcatcagcggcatcgcccttttgatcatgagcactattttaaacacactgggtttttcctggggtttatttgctctgccgcctggcgtcgatagttttgtcatcatcccgtttaccttatttggctcattgaagttggccgagtgcctctataagccaatacgctggctgctaaatgagagccgcaaatctcaaatcgaaaataacaaccctaaaaataacgctaagtcgcgttaacaggagatcgacctatgctgagagaactgaccagagaagaaatgcaacggattggcggcgccggtgacggcaataacggcggcgaccgggatcgcgactatggcccaagctcctacggcgcgcaggcgaacggcttccagcctaattgggcggcgaaaggctatgggctatttcaggatccttgtaccggcgcagtggtgaccggcgccattgccatggccggcgccctggccagccgtaacggcagtgcaattggcactgcggcagcctcagccttcgtcaacataggcggtcaatgcactaaagggtccggcaacgatcgcggcgtgcctttccgctaacgcgtaagctgaatggggaacatgcagacaaaaaaaggcgcgtcactcagtcagtagtgggagaacgagcgacgcgccaaacgagtgcgcccggtttcaagaagcctccctccccgcggggcggagaaggcgttttctaagcgcactaaagggaaacccgtcgcggtcaggcaacgggatattgctcttaacgattcatctggaacaacgacatgccctgcatatcgctgaaggttttatacgacgcctgcagcgccgcctgctgcatgaaataagacgagatagactcggccaggtcggcatccgtcaacgcgctcatctggatctggttggtcatatcgcgctctttgccgatgctgtccagttgatccatctcctgcagctggctgcccagctcggcgcgcacgctcagcacgttgttgtaggagttgtccaggccgcggttggctttcgccagcgcatcgttcacctgttgcttggtggcctcgtcggcgccctgcagcgggattttcagcgcgttcagcgcgatatcgatgctctcgaatacgttgctgaccggcgcgctgccgtccggctcgggcttcgggttgctggtcaacgacatgaacaccgcgttgccggtatggccgatggtcatggtgcggttggcgtccactttctgctgaaccgtcttgtcgccgccctgatagctgacggtgccgccgttgtcgacgaacggcgccttgtcgttcacatacccgccgaacatatagcggccgttgccgtcggtgctgttggcctggttcagcagctgatctttcagcccctgcagctgagtggccagcgactggcgatcgttatcgctttccgtaccgccggcattgacgatcagcgccttcatgtccgcgatggtggaggtcgcgccggccaagaccgtttcttccatcgacacgttctgacgagcgaaggtgcgcgccagcgtgtactggctgttttccgcctgcgattgcgacaacatcaccgcgcgcgacgccgccagcggatcgtcggacgggttgatcacccgcttgcccgaggaaagctgctcggccgccttcatgaacagcgactggttgcccgtgatgccgttcatgttctgttggtacatcatgctggtgctcatgcgcatgctgtgggttccttactctgagcgaccggcgccgttatcggcgccgattaacaatgaaatcaacgaatattcagcagcgcgtcgaacagcgagctggcggtctgaatcacctgcgcgttggccatgtagtactgctggaaacgcagcagctcgccatactcttcgtcaaggttgacgccggacatcgactgctgttgcgcgcccagctgcgtgacgatcttggcctgcgaggtggcgatggccttggcggcagcggtctggttgccgacgccgctgacgatgccggcgtaagcgccgctcagggtcgccttgccgtccaccaggtttttggtttgcagatccagcagcttcttggcgttttcgttatcgccgcggccgctgtcgtctttaccggcggcggcgatcttggacgaatcggtgatggccactttcagattgcccgccacgtcgctgaccggcttcacggtgaagctgtctttggcctgcgcattgccgtcgatgctcacttccaacccgtcgaagttcagcgtcggcttgccgtcggcgctggtgcccggcgtcgcgttgactttcacgttgtccggcaggcggctcacctgccagctgctgccgtcgaactcgacgcgataatcgttggccttcaccttgccggtatcggtgtaagagaccgacagcgacgcgtcgccggtgttgcgggtgttatccaccacccggccgccgctgaagctgaagaagtcgccgcccgcgtcgccgttcagatcgaagccggcgcgatgctgctggttaaagctgtccgccatcgccagcgccaactggcccagctgattgcgcacgccgtccagcgtttcgctgcggaatttcagcacgccgctcagcgtgccgctggtgatctggccttccggcacttcgctggcgccgttgccgcggttatagccgatggtcagacgggaaggatcgctgctggaaggcacggcttccacctgataggtgttgctgccctgcaccagggtcaagccgttggcgaaggagacggtataggcgtcgccgtcctgttgcgtgacctgtacgcccaccagctgattcaattcggtgaccagctgatcgcgctgatccagcaacgcattcggctcgccggcggcgctgccgcgcaaacgggtgatctcgtcgttcagtttggcgatctgttggccgtagctgttgatctgctgcgccgtatcgctgatctgttgattaacgccgttatccatgtcgcgcaggaatttatcggtgttgttgaactggttcaccaggccgttggccttgcccagcaccgtctggcgcgcggcgtcgtcaccggcgttgctcaccaggttctgcaggttggtgaagaagtcctgcatgttggtcgacagcgggttggtcttgctcgccaacaggttgtcgatctgtgaaatcttctcgtaataggcattttgcgccccgaacgcgctttgtgcgccgcgcagctggttggtgatgaactggttgtactctcggttgacgctggtgacggtcacgccgttgccgataaagccgctcatggtggccatgccgccgttctgcgccaggatcgcagtctggcggttgtagcccgccacgttgtagttggagatgttgttgctgacggtactgagcgccacctgagccgcattcagcccgctcatcgcggtattgattaagctattggacatcggaattccttatgctgcggcgccggcggcccacagggttcttaattgagctgctgagcctgttcgctcagcctgtttcggttatcggcaaaaatgagaagaacttgaggaaaaaaagcggcaatgcggtcagcatccagcgaacctccattgccgcctatcccctaaataattggcgccgctgcggcgtcaagaatgacgggggtttagaacaaatctttcagatcgtgggtgtaagctttcaccgcctgctcccccgcgctcttcatctgctgaatcacgctgaccagcttgctggcgtactgcgggtcggtggcatagccggcgcgctgcagcgcatgcgccgcctgttccgggctgtgcgcggcggccacgtcggcgtagcgcgggttgttggtcagcagtttgacgtaatcggcgatcgcctcgacgtacgacccgtaaacgcggaacttcgccttcaccttcttcgccgcgccctgttcgaactcggtggtggtgatctccgttaccggcccgttccagctgccgccggccttgatgccgaacaggttgtagctcggcgtgccgtctgaggtcgggatctcgcgctgcccccagccggactccagcgccgcctgcgcgacgatcagctgatgcggaatgccgctctgctggctggcgaccttcgccggtatcgacaggcgggcgacgaagttgccgttgttgagcgacagcggcgcggcggccggcggcgctttcggcatcgcccggcgcaccatctgctccagcgcctggttcggcagcgtttgcagcacctcgttgtccagcgccatcggcgacaggcccgcggtttcactcggcaccgcgttggcgttgctcatctgcttgaccatcatgtcggccagccccagtcctttttgcgacatctgctgggcgatttgctgatcgtacatcgaggtatagagccgcgtttgatcgctgctcaataccccgtcctgcggcaaggcggatcgcatgcttttcagcatcatctgtacgaacatgccttccacctgctgggccacctgcttgaggttgccctgcgggtcggccgccgcgtcgcgctttaggccgttcagcgcctgggcgtcataggccgcgcccgacatcgccatcagatcgccggccatcagatgatttccagcttggcgcgcaggcagccggcgctctgcatcgcctgcaggatcgacatcagatcgatcggcgtggcgcccagcgcattcagcgcgcggatcacattgttcaggttggcgctggcattcaccttctgcagcgacccaccctgctgttgcaccgagatctgggtgttaggcgtcaccaccgtctggccgccgccgaacggggtcgttggctggctgacggtgttctgccgatcgaccaccaccgacaggttgccctgggccacggcgcaagaatcgaggatcacatcgcggttcatcaccaccgaaccggtgcgcgagttgatgatcaccttggcgtccatcgcgccgacgttgacggtgatgttttgaatctccgccaggaagcgcacctgagagctgttgccctgtggcaccagcacctgaatggtgcgggcgtcgagcggcgtcgcggtgccgccgccgcgttggcggttgatggcgtcgctgatctgctgcgccaacgtgaaatcctcgtcgttcagctgcaggttgagcaccccgccgctgccgaaggtggtcggcaactcgcgttcgatggtggcgccgttgctgatgcgcccgcccgccaactggttgacctgcacgctgctgccgccggccgccgcgcccgcgccgcccaccagcacgttgccctgcgccagcgcataaacctggttatccacgcctttgagcggcgtcatcagcagggtgccgccacgcaggctcttggcgttgcccatcgaagaaaccaccacgtcgatattctgcccggcgcgcgagaacggcggcagtttggcggtcaccatcaccgccgccacgtttttcagctgcatattggtgcccggcggcacggtgatacccagctgcgacagcatattgctgaggctttgggtggtgaacggcgtctgcatggtctggtcgccggagccgtccaaccccaccaccaggccgtagccgatcagggcgttgtctcgcacgccctgcaccgtcaccagatcgcggatgcgctccgccgccgccggcaagcacaccagcccgacgcacagcgcgataaaccattttttcagcatcagtcaatccttagaacggtgaaacatttaagaagaagcgctgcagccagcccatggtctgcgcctcgttgatatagccattgccgacgtattcgatacgcgcgtccgccacctgcgtcgaggtgaccgagttgttgccgctgatggtgcgcgggttgacgacgccggagaaacgaatgaattcggtgccctggttgatggcgatctgcttttcccccaccacgtgcaggttgccgttggccagtacctggttgaccgtcaccgtaatggtgccgttgaaggtgttgttggcgttggcgccgcccttgccgccgaaggtgctgtcgccggaaatgtccatatcggcgcgcgcattgcccaacaggccgtcgaggtaacgcggcgaggtggcgacgccgaacttgctggcgccgttgcggctggcgttggcggaggagcttttgctggcgctgacgttttcctgcagcacgatggtcagagtgtcgccgacgttgcgcggccggcggtcttcgaacagcggctgatagccgtagttcatcggctgcaccgtctggaagattgagccgttcggcatcggcgcgctggccggcgcgggctgcgccgtggtcgcgccgtccaccagcggtttatgcggaatataagcgcagccgctcagcgtcagcatcaccattcccgccagccagcgttgtccctgccgcggcaggattgccatcgaatatgtggttaccacgggtatcgcctttgtttcacgaaagagaatgacgggcgcggcatgccgggcccgtcaaggacagattacagttgcgtcagcttttgcagcatctgatcggaggtcgataccgctttgctgttgatctcgtaagcgcgctgagtctggatcatgttgaccagctcttccgccacgttaacgttggaggtctccacgtagccctgatacagcagaccggcgccgttcagccccggcgtgctctcgttcggcgcgcccgagctttcggtttcctgatacaggttctcgcccacgctctccagaccgctgtcgttgacgaacgtggtcagcgtcagttggcccacctgctgagcggcggtttgtccctgctgggtaacgctgacgatgccgtcgcggccgacggtgatggacagcgcgttcgccggaatggtgatcgccggctgcacctggaaaccgctggaggtgaccagctggccgttctgatcgatctggaacgacccgtcgcgggtgtaagcctgggtgccgtccggcagcatcacctggaagaaaccctgccccttgatggcgacgtctttgctgttgttagtctgcgacaggttgccctggctgtgcaggcgctcggtcgccaccgggcgcacgccagtgccgatctgcagaccggaaggcagcgtagtctgctcggaggactgcgcgcccggctgacgcatggtctggtacagcagatcttcaaataccgcacgctggcgcttgaagccgttggtgctgacgttcgccaggttgttggcgatcacgtccatgttggtctgctgcgcgtccagaccggttttggcaatccataaggatggaatcatcggttatttccttgctgcttagctcactgagagcagtgagttggcacgctgttcgttttcatccacgctgtggatgaccttcatttgcatttcaaaacggcgggcgttggcgatcatgtcaaccatggtctccatcggcttgacgttgctgccttccagcaccccgggcatcacccgcacctgcggatcgttttgcaactgattgccgcgcagctgttgggtttccggcgtcaggcggaacagcccgtcgtcaccgcgcatcacttcgcgcgcatcggccttcaccagcttcaggcggccaatctgcgcgatggtgttcggcggatcgccggcgttcagcgccgaaatggtgccgtcggccgcgatggtgatctccgccgacggcggcacctcgatcggcccgccgtcgcccatcagcggcatcccctgcaccgtcaactgcccggtggaggaaatctgaatgttgccgttgcgggtgtaagcttcaccgccgcccggcaggctcaccgccaaaaaaccatcctgctgcagcgccacgtccagcgggcgcgccgtgtagttcagcgcgccctggctcatgtcggcgcccggcgtcgaggcagtcaccaaggtgcgtgtcgccaggctcggaccgtcgaccggcaccgcgcgcagcgcggcgagctgggcgcgaaagcccggcgtcgacgcattggccaggttgttggcggtaatggattgctgctccagcgtttggcgcgccgcgcccatcgcggtataaatcgcgtgatccataactcggccctattagcgcaggctaaccagcgtctgcaggatggagtcctgcgtcttgatggtctgggcgttggactggtagttacgctgtgcgacgatcatgttcaccagctcctggctcagatcgacgttggaagactccagcgcgccgctggtcagcttaccgaagccgccgccgcccgacagaccaacgcgtggctggccggacgcgccggtttcctgccaaacgttatcgccctgcgacgccagcccttccgggttggagaagttggccatgacgatctgacccagcacctgggtctgctggttggagtagatgcccaccactgtgccgtcgttgttgatctggaagttggtgtattcaccggcggcatagccgtcctgcgccaccttgctcaccgagtcgctgcctacgttctgctgcatgctgccggcgaagctcagggtgaagttttgcgccggcgcgccgtctttggcggtcatcgggatcaccatgctgaactcgcccggcgcgccgttggtgctggtggttttcaccagattaccgctggtgctgaactccatggtgccggcgttcactggcgccgcgctgccgtcctgggtgtagacctgccacttgttgtcttcggtcttcacaaagtaagcgttgatgttgtgcgcattacccagcgagtcgtaagcggtgatggtgttgacgtagttgtagctgtcctgcttggtcggatcgaaagtcttgttttccggcactttatgggtggacttcaggttggccaccatctcgccggaggtggacgccttggcgttcatcatgccttcgggaatgctcagcggcaccgggttggcgccctgctggatggtcggtggggaaccggccgccgggtaaccggtcagctgcaggccctgcatgttggtcaggttgcggttctcgtccagtttgaactggccgttgcgggtatagaagatgccaccgtctttatcctgcatgcggaaaaagccgttgccgttgatggccacatccagcgcgcggctggtgccggtggtggtgccgcccttgaagttctgggtgatgccggacactttgacgcccagcccgacctgcgaaccggcgaacatgtcggcaaaggagacgctgccggatttgaagcccgcggttgcggagttggcgatgttgttaccgatcacgtccaggttggttgctgccgcgttcaagccgctgactgcctgagaaaaggccatgttattctccgaatagtggtcaggctatcgtccgattgagcctgatgcttagggttataagatctgtcgcacgtcttccagggtggcgttgcccgccaggccgagatccagcttggcgccgttgccgtcgcggatcacgccattcaccagcccgaagtgcaggctgcgcgccaccagctgctcgccgttgcctttggcgttaatcgccactttgtaggcgccgtcgggcgcggtggagccgtcatccagcgagccgtcccaggtgaaggcgtgcacgccggcggtcaggccgccaatttcaatggtgcgcaccacctgcccgctggcgttggtgatggtggcggtcacctgatcggcggcgcgctccagttccacgccgaacggcgtggtgctgaccttgccgtccttgctgccgaccagaatattgttgcccggcaccatcacgccgtgaccgatcagcgcagtggcctgcagcgactggttgctgttgatctggccggagatcgaccccagcgtggtgttaagcttttcgataccctgaacggtgttgatctgcgccagctgcgacgtcagctcgttgttctgcatcggattggtcggatcctggtttttcaactgcgcgaccagcagcgtcaggaagctgttgtgcagatcctggctgttggtggtcttgctgttgttaccgatgacggtgttgtccaacgactcgttggtggttgcggcgatagccatggaaatctccggttactgacccagcgtcagggttttcatcatcatcgacttggtggtgttgagcacctcgacgttggcctggtagctgcgggaagcggagatggtgttgaccatttcccccaccacgtcgacgttcggcatgcgcacataccccttggcgtccgccagcgggttgcccggctgatacaccaggcgctcgggcgccggatcgtccaccacctgggcgacgcgcacgccgccggtcggctgccctggcgccgccgcgacctggaacaccacctgcttggcgcggtaaggttcaccgtccgggccggtcacgctgtcggcgttggccatgttgctggcgctgacgttcatgcgctgggattgcgccgataacgccgagccggagatatcaaaaatattcagtaaagacatgcgccttatccttgttgcagcacggacatcatccctttgatctgcccgttgagcagcgtcaggtcggtctgatatttcaggctgttatcggcaaagttggtgcgttcgcgatccatgtccaccgtattgccgtccatcgacggctggtccggcactcggaacagcagatcaagctgtggcggctgcagggtctgcgccgggatgtggcgcgccgccgtcaggttcagcgccatgccgttgccgctgacgcgcccctgctccagtactttgttcaattggctggcgaaatcgatatcccgcgcctgataacccggtgtgtctgcgttggcgatgttggcggccagaatttcctgccgctgggcgcgcaagttcagcgcctcttggccaaagcgcagagccgcgtccagtttgtcgagcatgctccctccgcgaggttagaatttggagtcgacagcataaacgccccctgcgccaccctatcgcgggaataaacgcaaaatggggcgctatttatctgcttagcctgcgcgcgctgcgggtacacttacgcgtatcccgatgaagcttgagaagatgacgatgaaaggtaaaatgctgctgcttatcggcctgctgtgcagtctgaacgcgcgcgccgacgatctggcgacgcaaatcgaaagcttcatccaaggcaagttcagcggcgaaccggtacaggtaaaagtgcgggtgcgcacgccgccgaaccaatggcccgcttgcgaactgccgcagctgtcgctgtcgcccaacgcgcggatcggcggcaacgtcagcatttcggcgcgctgtggccaggagcggcgttttatccagacgcaggtgcaggtgttcggtcgctatctcgtgtcggcgcgcggcatcagcgccggcagccggttgacggcggcggatctggcgttgaaacagggccggctcgataccctgccgccgcgcgcgctgaccgaagcgggcaaagcgttaggcgccgtcagcctgcgcaacatcagccccggtcagccgctgaccctcgccatgctgcgccgcgcctggattatcaaggctgggcaaccggtgcaggtcaacgcacagggcgaaggattcagcatcagcggtgcgggtaaggcgatgaacaacgccgccgccgaagacagcgtgcgggtacgcatggcctccgggcagatcgtcagcggcgtggtcggggacgacggcgcgatccgcattacgttataaaaaagtaaaggttccgccaaccttgccgataagacaaatcaagcagcattttattggccaccagggccgcaacactttcattgcagcgtcgtcgcccgcgagcggcgacggcgtaaacggagatggaccatgagtatcgatcgcacccagcggttacagccggtttccactgtgcaaccgcgtgaaaccccggccgacaacccgctccagccgcgcaaggccgccgtggccgaaaccgccgtcagcggcacgcaggtcaaactgagcgaggcgcaggcgcgcctgatgcagccgggcacccaggatatcgatatgggtcgggtcgaggccatcaaacaggcgatccgcaacggtgaactgaagatggacgccggcaaaatcgccgatgcgctgctgcaagacgcgcagagcgatgttcaatggatcgccggacgcgactgacagcacgcggcgaatagcggtaaaggataagtcattactatggaaaagctggcacaactgctggataaactgttggaaacgttgcaggcgctcaatggtgtgctggaggaagagcacgacttgctgtgctccggccagttgccgggcgtggccttgcagcgcgtcaccgatgccaaaagccaactgctggcgacggtcgcttatctcgagcaacagcgcctggggcaggaaaaaacctgcgggcaacgcgccccctatgccagccaagcgcccctggccgatcgttggcagcgcgttcaattgctgagccaaacgctgcgcgaaaagaaccagcacaacggtctgctgctcaatcagcagatcgaccataacgctcaggcgctggccatcctcagtaaaaacaacaaatcgctgtatggcccggacggccagtcgcacgccggcagcctgctcggcagaaaaatcggcgtttgacctgactcatttgcccggtgagcctatcaccgggcatgcgttcaccggcttctgcgcatcccgtcgcattttctccctatcactctttgaattcacttaaggctttgcgtcaggctgcgcatggcgtgaatttggctgtttctttctctttggcctcttgtcaccctgtggttatttttaaaccacttgaaatatacccttagagggtatagattcgcagggagagcgaatggccgacatttatctcaccaaaacctttcagggttttgccgcacgcgagcgcattagcgacgccacgatagtgaaagcggcgcgagagatgcaacatcagctgtacgatgccaatcttggcggttgcgtatacaaaaagcgcatcgctcgggctggtgcgggcaaacgtggcggctatcgggtactgatcgtttttcgcgatgaagaccgcctgttttttatgcgcggctttgccaaaagtgagagagaaaacatcagtgcggatgagttacaaggattgaaacatctggctgcgctgtatctggattattcgccattcagactctaccagctggtcaacaacaaggaattacggaggctaagcgatgagtaaaattcttgccgagatccaccaggaagttcagggcctgcatcgcgccggtttcgtcgatgacgtgaccatgcgcaccttcgacatgctgtgtctgcggccggtgaaacagttcgggccggccgagatccgcgcgctgcgcgaacgggaaaacgtcagtcagccggtgtttgcgctgtatctcaacgtcagcaaaaaagcggtgcagaaatgggagcgcggcgaagcgcaaccgaactccgccgcgatgaaactgctgacgctggtggaacgcaacggcctgcaaattctggcctgatgttactgataattgacgatcacctgattgccaatcacccgcagcggcggattcagcccgccttgcgactgcacgtaatagacaaagcgcaattccgcattggccggttcgccctgcagaccgttgctgctgccgctgccgccgcccagcggaatacagcggtttaccgtgcagagctgggcctgcagccccaccggttccggccccagcaaacggtagcgccagctgacgctggtgatgcgcgcatgggcatccggcagcgcgttcggcggccgcaaagcggcggattcatcgcgcatcccgccctgttccagcgtgacccccgccccttcagccacccaggagccggacaccgcgccggcggcgagcggagccagcaaacaaaatacgaacagacagcgtttcatcaggccgctccgatggtcgaggtcatgcgaatctggcgatcgtcgttgatctccagattggacaacaccacgatctgcggcaggctgcgacgcaggaagcgcgccagcaaggcccgcagcgcatggttgaccagcagcaccggcggcgcgctgagcatttcttgccgctgcaacgcctggcgtgcctgatccaacagacgatcggccagccccggctccaggccgccgccgccctgcaacgcctgcagcaacagacgctctaactgggtatccaggccgataacctgaatctcgccgttgcccgggaaccactgctgcgtgatcgccctgcctagcgccactcgcaccacggtggtcaattcataaggatcgctctgcgccggggcgtgttccgccagcgtttcgacgatggtgcgcatatcgcgaatggaaacgcgctcggcgagcagattttgcagcactttgtgcagcgtcgtcagcgacaccacgcccggcacgaagtcttcggtcagcttcggcatctcctgcgacacgcgatccagcagctgttgggtctcctggcggccaaacagctcgctggcgaactggccgatcaggtgattgaggtgtgtcgccaccacggtgctggcctccaccacggtaaagccctggatctgcgcctgctcgcgcaaggcgctgtcgatccatatcgcctcgagcccaaaggccggatcgacggttttgtctcccgccagctcgcctacggcattgccggggttgatcgccagccagcggcccggctgcgcttcaccgctgccgatctcgacgcctttcatcaggatacggtagctggcaggcggcagttccaggttgtcgcgaatgtgcaccaccggcggcagatagcccatgtcctgggcgaatttcttgcggatgccgcggatacggcccagcagttcgccgttctgctgaaaatcgaccatcggaatcagccggtagcccacctccatccccagcggatcttccaactgcacgtcggcccagctggcttcggcggcctgcggattctccggcatcaccggatcttccaccgttttcggcgcctgttgttcacggccgcgcagccaccaggcgaggcccaacagagccgcggtaaacagcaggaacaccaggttcggcatgcccggcaccaggcccagcagccccagcaccccggcgctcagcagcatcacgcgcggattgttgaacagctggcccaccatctgctcgccgacgtcctgatcggtcgcgacgcgggtgacgatgacgccggcggcggtggagatcaccaatgccgggatctgcgccaccaggccgtcaccgatggtcagcagcgtatagctttccgccgccgcccccagctccatgccgtgttgcaccacgccgaccaacaggccgccgactacgttcagcaccatgatcatcaggccggcgatggcgtcgccgcgcacgaatttactggcgccgtccatcgagccgtaaaagtcggcctcctgggtcacttcggcgcggcgtttcttcgcttcgtcttcaccgatcaggccggcgttcagatcggcgtcaatcgccatctgtttgcccggcatgccgtccagcacgaaacgcgcgcccacttcggcgatacgccccgcacctttggtgatgaccataaagttaatcagcaccaggatgatgaacaccacgatgccgatggcgaagttgccccccaccaggaagtggccgaaggcttccaccacgcggccggcggcggcggagccggtgtgcccctccagcaagatgatgcgtgtcgacgcgacgttgagcgacaaacgcagcaatgtggagaacagcaggatggtcgggaaggcggcgaattcgagcgtgcgctgggtgaacatcgccaccagcagcaccatgatcgacagcgcgatgttgaaggtaaacagcaggtcgaggataaacgccggcaacggcaacaccatcatcgacaggatcagcaggatcagcaccgggccggccaacacctgccactgcgtatctttaaaattgcccggcaaacgaagcagggaggccaaattagccatcagagtcactctcttttgcaaaatccagtgcttccggcaccggtaaacgttcaggttttttcgggatcaggccgccctcgcgccgccagcggcgcagctggtacacccaggccagcacctcggcgaccgcggcatacagggtggccggaatatgctggccgatctcgctgtgccgatacagcgcgcgcgccagcggcggcgcctccagcatcgggatgcggtgttccgcaccgagttcgcgaatgcgcaaggcgatttcgccggcccctttggccagcactttcggcgcactcatttttttgtcgttgtactgcaacgcgacggcgtagtgcgtcgggttggtgacgatcacgtccgccttgggcacgtcggccatcatgcggcgccgggcgatcgcccgctgctgctgacgaatgcgtcccttgacgtgcgggtccccttcctggtctttgaactcgtcgcgaatatcctgcttggtcatcttcagcttcttgaagtgactccacagctgataaaacacgtcgaacgccaccatcggcgtcaaccccagcaccaccagaaaaccgcagaacagaatcatctgcagcgcgttgcccagcgcatcgagcggctgctgggtcatcagatgcagcatcgccgcccagttgtgccacagatagaggccagtcacccaaccgaccagcgtcgctttcaggatccctttcagcagctcggccagcacctggctggaaaagatgcgcttcaacccggatagcgggttcagccgcttcaaatcgaacttgatcgacttgccgctgaacaaaatgccccccagcaacatcggcgcggcgagcgccaccagcaccagccccgccatgatcggcagcagcgccagcaccgcctggcgcagcaacatgcccaattggcgcagcatctgtttatcgttgctgaccatgccgtgatcgaagttcagaccttgcgtgagcatcgccgccagctgttgcgccatgttgctgccggacatcaggataatcgccaggcccgagagcagcatcagtaccgaggtcagctcgcgcgagcgcgggatctggccgtcttcacgcgccttttccagcctgtggggcgtgggggcctcgcttttttccagatcgctgtcttcagccacgaaacgccgttcctgtgtcgggagggtaaagaatggcggtcagcatgccaaaaaattggcgatgtcattgggggaacaacggggaaaaaggcgggttatttaggggatgagaccaaaacgacgtggcttgttgtcggggcgcgccgtcgcgcgccccgaaaggcctcagaaaccgaggctgtcgagcagatcgtcgacctgcgcctgattggcgatcacgccgacgccgttctggtcgagctgcgggccgttcagcaggctgtcgttcggccgtttttccttcaccggctgctccggcatgttttccatcagcaccatcagcagctgcttttcgatctcctgtaccacgtccatcatgcgcttgatcacctgaccggtcagatcctggaagtcctgcgccatcatgatctccagcagctgggcgttggtgaaagccgtatggcccggcacctgatccagatactggcgcgtgtcgttgaccagagaacgcgcgtcgtccagttcgatgggattggcgaaccactcgtcccagcgccctttcaacgcgttggcgccggattccagctccgcctggcgcggttgcgccgcctctacgcagttcaacgcccgttccgccgcctgcgccgtcatggttacgacatagtcaagacggtcgcgcgcatccgggatcgcctctgccgcctgggcgatcgcctgatcgagccccagttcgcgcatgctgtcgcgcagcattcgggtcagttggccgatgcgggagatgatctctcccgcggtcgctgcatcgctggcaggcattggaatgtctctcatcgccctctccttacatgcccaatttttcaaaaatcttgttgagcttttcttccagcgtcgccgccgtaaatggttttactacataaccgctggcgccggcctgcgccgccgcgatgatattttctttcttggcttccgcggtcaccatcagtaccggcatcgcggccagcgcgctgtcggcgcggatggtttgcaacagctcaagcccgtccatgttcggcatgttccagtcggacaccacgaagtcgaaaccgccggcgcgcagcttgttcagcgcatccgcgccgtcttcagcttcttcgacgttgttgaagcccagctctttgagcaaatttctgacgatgcggcgcatggtggaaaaatcgtccacaaccagaaatctgaggttcttgtctgccattgttactcctgaaatagttaaccgtttaatgatgcaacaccgcaggccgccgcacggcgaacctgggtcatatcgccgccgggaagaccctgcggactgaaatcaaatgcgcaatgcctggccgccggcgatctgcgccagcatgcgctggctcattctgtccagctcgaccacttcgctgacgccgccgctggcgatcgcctcgcgcggcatgccgaacaccacgcagctcgcctcgttctgcgccagggtataggccccggcgcggtgcatctccagcatccccgccgcaccgtcgttgcccatgccggtgaggatcacccccaccgcattgcggccggcgtattgcgccaccgagcggaacagcacgtcgaccgaggggcgatggcggttgaccgccgggccgtcatgcagcttcacctgatagttggcgccgctgcgcgtcagctccagatggcggtcccccggcgcgatataggcgtggcccggcagcacgcgctcgccgtcctccgcttctttcaccgtgatctggcacagcttgttcagccgctcggcgaacgaacgggtgaaacccggcggcatgtgctgggtgatcagcagcgccgggctggtagccggcagcggctgcagcacctggcggatcgcttcggtgccgccggtggaggcgccgatggcgatcagtttttcactgctcagcagcggcgcatggctgaggatcgccggcgccgggctgctggagcgctgaggcaggcgcgctctggccgcggtgcggatcttctcggcaatcagctcgctgtaggccaacatgccctcgcgaatgccgagttgcggtttggtgacgaaatccaccgcgcccagttccagcgcgcgcagcgtgatttccgagcctttgccggtcagcgaagagaccatcaccaccggcatcggccgcaggcgcatcagcttctcgaggaaatccagcccgtccatgcgcggcatctcgacgtccagcgtcagcacctgaggattaaattttttgatcagatcgcgcgccaccagcggatccggcgcggtcgccaccatttccatgtcggcatggccgttcacgatttccgtcatcagctggcgcatcagtgccgaatcgtctacgcataacactctgattttactcattacctctccttggtcagcccatacacggtctgcccacgcaagtagaaatcccggctgatctggctgaaattctcggagtggccggcgaacatcagcccccccggcttaagcaagggaacgaagcggcgcaggatgcgctcctgcgtcgccttatcgaaatagatcatgacgttgcggcaaaaaatggcgtcgaattgccccggcagcgcccactccggcgccagcagattcagcggctgaaagttcactcgcgccgccaactccggccgcacgcgcaccagcccctgatgcggaccggtgccgcgcagaaaatagcgctgcatttgggtcggcgtcagggtacgcagatcttcctggcggtaaacgcccgcctccgctttttccagcacctgcgtatcgatgtcgctggcccagacctggcaactgccggcccgctgccccagggcatcgctcagcgtgatggcgatcgaatacggctcttcgccggtcgaggccgcggtgctccagacgctgtagccgttcggccgcgagcgcgcatgctccgccaggatcgggaagtgatgcgcctcgcggaaaaatgccgtcaggttggtggtcagcgcgttgatgaacgcctgccactccgcgctgttcggatcgctttccagcagcgccagataatcgccgaaatcgtgcaatcccagcagccgcaaccggcgcaccaggcggttgtaaaccatctcgcgcttatgctccgccagcacgatgccggcgcgttgataaatcaactggctgatacggcgaaaatgcacgtccgacagcggcaggcgctgcaccatttgcgtcaacatcgacgcagtatcccggttagaagttgacggcgcctgtttcatgccgcctcaccagagtaaaacgtgctgcttatgcggtttgacaatcttgggcttcctttaccacgggtgaaactgcgttgttgctgttacctggcgcgacgaagttatcgtccgccagacggaataccgcgaccgcgtcggccagggtaatagcctgctcttccagcgcggtggcggcagaagcggattcttccaccagcgcggcgttctgctgggtaacctgatccatctgggtcaccgcctgcgtcacctgctcgatgccgcggctctgttcatccgaagccgacgcgatctcgcccatgatgtcggtgacgcgcgtcaccgaacgcacgatgtcctgcatggtggcgccggaattttccaccagcaccgagccgtgtttgacgcggctgaccgattcgtcgatcagcaccttgatctctttcgccgcctgcgcgctgcggctcgccaggttgcgcacttcgccggcgaccacggcgaaaccgcgcccctgttcaccggcgcgcgccgcttccaccgccgcattaagcgccagaatgttggtctggaaggcgatgccgtcgatcacgctggtgatggcgccgattttctgcgagctgttggcgatatcgtgcatggtggtgaccacgtccccggccagttcgccgcccttggccgcggtggccgaagcgtcgcgcgccagctgagaggcctgccgcgcattgtcggcgttctgtttcaccgtcgcggtcagctgttccatgctggcggcggtttcttccagcgaagcggcctgttgctcggtgcgggaagagagatcgttattgccttcggcgatctcctgcaggccgatcagaatcgactccgcaccgtcgcgaaccgcgccgacggtaccgatcaatgactgctgcgtgcgttgcaggctggcgaacaacatgctgatttcattgcggccatacacctgaatcggcgtcgccaaatcgccggcggcgatgcgttcaaagtggctgcggatttggttcagcggctgtaccaacatggtgcgcaaccaccacatggcgctgccggtcaccacgatcagcatcaagaccgcccccgccagcatcaggcccgccagcgtgaaggagaattggttggcgtctcgagcctcgctgatgtcaccgttgaccaactgcaggtactgcacgaagtcagcctcaaacaggtcctgggttttctgcgtcggctgatccataaacgcctgcagctcgcccttttccaggaaaccgatcagttcacgcagtgcgccgcgcagccgctcgtagctggccttggtggtggccgtctgctggttctgctgttcactgctgcgttcaaccgccataaactgattgaaatagagatcggccttctgcagcgaactgcgggcgctgctcatcaattcgttcacctgctcctgcggcagtttcagcgccgcgcgggtgccggcgcggttcagcgtattgcgcgcctgcaacagcgacacccagctcaggctgagcgaatcgcgctgctggctgccgagggtgatgatgtcgaggttgtggttatcggaacgaaacgcggaatacgacaggccgctgctggccaactgcagaacgcagaaggtcatcaacaacaggaacaagctggtagagatacggattcggttaaacactgtgaacctccttgcagccggccggcgaccggcctacgtagggaaaagggcctctgcgagagaggcccgataccggtcagaacgtttcccagttatcctgcagatcgctggcgttcattttcttatgattgattaccggtgttaccgtcgccttgctggtgacaggcgctttaaactcttcctggccttccgacctcaggcggaataccgctaccgactgggtcagcatgctggcctgttcttccagcgccgccgccgccgaggcggattcttccaccaacgaggcgttctgctgggtcacgcggtccatttccgctaccgcctggccaacctgatcgataccgcggctctgctcgtcggaagccgaggcgatttcgcccatgatgtcggtcacgcgggtgacggcgttgacgatgtcacccatggtttccccggcgctttccaccagcacggagcccatatcgacgcggctgaccgagtcttcgatcaggcctttgatctctttcgccgcctgcgcgctgcgctgcgccaggttgcgcacttcaccggccaccaccgcgaagccgcgaccctgttcgccggcgcgcgccgcttccactgcggcgttcaacgccaggatgttggtctggaaggcgataccgtcgatcacgccggtaatatcggcgatcttctgcgagctgccggcgatgtcgtgcatggtctgcaccacgttggccaccaccttgccgcctttctgcgcggtttcggaggcgctcagcgccagctgtgaagcctgacgggcgttttcggcgttctgtttcaccgtcgcggtcaattgctccatgctggcggcggtctcttccagcgaagcggcctgctgctcggtgcgggaggagagatcgttgttgcccgcggcgatttcagacgcgccgctgtagatggcgtccgcaccctggcgcacgccgctgacggtttcgatcagttcgctttgcatgtgtttcaggctggccgccagcacgcccatttcgttgcggctgttgacgacgatctgctgagtcaggtcgccggcggcgatctgtttgatgtggtcgatcatgcggttcagcgggcgcaccaggatgtgatggataccggtccagaccagtacgatcaccgccagcaccaccaccagcaccacgatcagcgtccaaatagccgagttgtaggagctgttgctgccgtcaaccgcgatttggtacagcttgccgttttgctccagataaacgttgtagctctgctcaaagttgtcctggtaactctgcgtaggctgatcgaagaaggcgttgattttgccttcgcccagcagttggatcagctcggagagcgcgccgtacagcacatcgtactgctgcttgaggcgttccgccgactgaggatcctggcgcgggtcctgaggaattttctcgtacgcggcgtagtgtctttccgcttcacccagctcttccttcgccttggccagcagttcatcaatggtggcgccgctgccgatcttgttggtatccatcatgtagcggataccggcgcggttcagggagttgcgcgcctgcagcaggtcaacgcggctttcactcagctgcagctgctgctggcggatcgtttgcaggacggtaaagttttccttatcgcttttcagcgaggagaaaaaaagtccgcccgaaatcaactgcaaggcgccaaacagcaccaacaccagcaacaggctggtgaccaccttcatacgatttaacatgatttcccttgttgaagcccgcgcagacaggctctgatgacgttgaatgtgagagttatcggcgccgtgcggcaaaactttatgcgggaaagtaactatttttagtgggggttccgagcgcggctgaggccatcgcgacagatcagggaaagtgaagattaaagggggcggcgccccgccccttgagtctgaaatcagacgcttttcgccacgctgtcgaccagcgacatctcttcgctgctcagcagcttttcgatatccaccaggatcagcatgcgctcgcccagcgaaccgaggccggtgagatattcggtcgccagggtcaccgcgaactccggcgccggacggatctgatcggcggtgagcgacagcacgtcggagacgccgtcaaccacgatgcccaccacgcgctggccaaagttcaacacgatcaccacggtgttttcatcgtaggaaacactttgctgcgaaaatttcacccgcagatcgatgataggaacaatcacgccgcgcaggttggtgacgcccttgatgaacgccggggtgttggcgatgcgggtcacctgatcgtagccgcgaatttcctgcaccttgaggatgtcgatgccgtactcctcgttgcccagggtaaaaatcagaaactcttgccctaccgtttcgccagccaatttgctgacggctgccaatcctgccatatcattcaccttttaaatcaataaactcattattatgcggcggcgtccgtcagacgcttttcacggttcaaggtttgcaacgccgagacatcgacgatcaaggccacgctgccgtcgcccagaatggtcgcggcggagatgcccggcactttgcggtagttgctttccagattcttcaccaccacctgatgctggccaatcagctgatctaccagcaacgcatagcggcggccggcgctttgcaggataacgacgatgccctgcgtggcgtcggttttggcgccttccacttcgaatacccgatacagctccaccagcggcaggtattcgccgcgcacctgcagcacacgctctccgccggccaacggatgcaaatcctccgcctgcggctgcagcgactccatcaccgcgttcaacggcagaataaagacttcgtcgttcactttgaccgacatgccgtcgaggatcgccagcgtcaacggcagcagaatgcggatggtggcgcctttaccggcctgcgaacggatctcgacgtggccgcccatctcctgaatatttcttttcaccacgtccatgccgacgccgcggccggaaacgtcggtcacctgctcggcggtggagaaacccggcgcgaagatcagcatgccgacctcttcgtcgctcatgctgtcgctgaccgccagcccttgcgaagccgccttggcgagaattttttcgcggttcagcccggcgccgtcgtcgatgacttcaatacaaatgttgccgccctggtgttcggccgacagcaccagattgcccaccgccgacttgccggcggcgatacgggtagccggctcttcgataccgtgatcgaggctgttgcgcaccaggtgcgtcaacggatcgataatgcgttcgatcaggctcttgtccagttcggtcgagctgccctgcagcgtcagctccacctgtttattcagcttgccggccagatcgcgcaccagccgcgggtagcggctgaagacgtactccatcggcatcatgcggatcgacatcaccgattcctgcagatcgcgcgcgttacgctccagctggctcatgctgttcagcagatcgccgtggttcaccggatcgagcgtgccggagcgttgcgccagcatcgattgggtgatcaccagctcgcccaccaggttaatcagctgatccaccttttccaccgccacgcggatgctggtggattcgctcgccttggcgcgcgcttttggcgcttcggccggtttcgcggcaggtggcgcggcgttcgcgaccggcgcaggctccggtaaggcggccacttccggtaagctcgcttctgcgatggccggttcgctctgggtcggcgtcgagaagctgatttgttccggttccagcacgaagcacaacacggcgctgatgtcgtcttcactggcggaggtgagcaacgtcacgtccagactgtgttccgtctgatgcggatctttaacctcgccgaggttgcccagctcttccaacatcaaggggatttcactggctttcagcccgttcaggctgatgcgcatgccgccctcgatcgccgccggcgcggccgatggcttaacgacaggctgctgaacggccggttgagccgcaggcgcctcttgctgctgttgcgcttccaacgccagctggcgcagcgcctgacaaatgtattcaaagctttcagcgtcaggctgttgcgaggttttataggcgtccagttgctcctgcataatgtctttggtttccagaaacaggttgataatctcggtgctcaggctcatttcctggcgtcttgcaccgtccagcaggttctccagcaggtgggtggtttcctgcagcaccgaaaaaccaaaggtcgccgcgccgcccttgatcgaatgcgccgcgcggaagatggcgttcaacggctcgatatcgggggccagcggatccagctccagcaggtgttgctccatgtcggccagcaactcgtctgcctcatcaaagaaggtctgataaaaatcgctaatgtccatgctcacggggtcacctctggctgtgagtcgcggttagtcggtgcgggtgcggacgccggtggttccggcgcctgatcggccggtgctatcgccggggatgcctgcggtggagcgcctggcgttgtcgccaccggttccggggccgtcgccgagggttccggcgtttggctggccggtgcggtcgccgacggcgccagctgcttcaggctgtccggctgggcgatatccatcgcgttgctttcggcattttcgtgctcgatgccctcttgcgtttgcttgttcagcaccagcacggtgatgcgacggttaatcgcgtcatcggcgccatgctgtttcaggctcatggtggccgccatgcccaccacccgcagcaccttgccttccgccaggccgccggcgatcagctcgcgccgggaggcgttggcgcgatcggccgacagttcccagttgctgtagccgcgctcgccggtggcgtaagggatgtcatcggtgtggccggacagacttattttgttcggcaggtcgttaaggatcggcgctatcgcccgcagaatatcgcgcatgtagctctcgacctgcgcgctgccggttttgaacatcggccggttttggctatcgataatctggatgcgcagcccttcgtccatcatgttgatcagcagatgcggacgcagcgccttcaggcgcggatcggactcaatcaactcatccagcttttcgcgcagcttgttcaggcgcagctcttcggcgcgcgagtccggcgaatcgacctgttttttcaccaggccatgctgctgcgtgggatcgtcgccgccgccaggaatggggctgctctcggaactgctcttgtcgccgctggtcagggcaaccttgagcggcgtacggaaatattcggcgatttgcgtcagctcctgcgggctggcgatcgccagcagccacatcaccaggaagaacgccatcatcgccgtcataaagtcggcataagcgatcttccaggagccgccgtgatgggcggcatgatgcgacttgcgctttctgaccagaacgaccggatgattctgtttcatgcttcttcttcttccgtcgcctgctgcgccggcgctttcacgcggcgcacgtgttcttccagctcaacgaaagaaggacgttcggtggtatacagcgttttgcggccaaactcgactgcgatctgcggcgcgtaaccgttcagactcgacaacagcgtgaccttgatgcactgcatcatcttgacgttttcggcgctcttctggcgcagcaacgtcgccagcggcgagatgaagccgtaggccaacaaaatgccgaggaaagtaccgaccatggcgttagcgatcagcgcgcccagctcagcggccggacggtcagccgaagccagggcgtgcaccacccccatcaccgccgcgacgatgccgaacgccggcaaggagtcgcccaccatcgccagactgccggcgggcacttcgctttcctgctcgtaggtttcgatctcttcgtccatcagcgcttcgatctcgaacgcattcatattgccgctcaccatcagccgtaaatagtcggtaatgaactccaccagagtgttatcggcaaggatgcgcggataattagagaaaatttcactttcttgcggattatcgatatcgaactcgagcgacagcatgccctgctggcgcgatttggccagcagacggaacagcaacgccatcaaatccatatacagatctttgttgtatttggaacggcgcatcagccgcggcagcgcgcgcagcgtggctttgatcgctttgccgttgttgccgacgataaaggcgccgacgcccgccccgccgataatcagaaattccgccggctgatacaacgccccgagatgaccgcccacgatcaggtagccgccaaacaccgcacccaataccacgagataacccaaaataactagcacacgcattccttaaattaacaatgtggatggaaggtggggcaaacgcgccctggcgcgacagaccaggctgcatgtctgggggcggcatgccgcccctgcgtatcacacgtcggtattcattgccgagagccggcaacgtggcggctcaaatggcgcgtttgacctgctcgtccagcagttgaggaataatatcggccagttgcggcgaaagtttacgtctttttacggcgcgggatgggggttggcataaactgcagatgaaaccattcagcggctggtgcgcgtgggtgataaatgcgccgccgcagcagctgcaggcggaaagctgcaacatgccgctatcgacgaagcgcaccagcgtccaggcacgggtcagcgccagcaacggcgcctcgccggcctgctgcggacactgctcgagatagaggcgataggctttgatcaccgcctccacgccgctgcactgcccgcttttcatcagaaacaggtaagcgttgtaaaacatcgacgagtgaatattttgttcccaggtcataaaccagtcggttgagaacggtaacattccttttggcggcgggctgccgcgtaactccttgtaaagtttaatcaagcgcccgcggctaagctgggtttcactctccagcatctgcaatcgggctcccagcgaaatcagctccatggcgagctgaatgtccttggcttcttgaacgatacttttctcaaccatcatcaggctcttttcttcgtcgggctagcgtctttactcgatagctcttgcagtaaatggcttgatagcaaaatgccggtatggatttgttgcagatcgtcgacgcgcgactctttggtcaggcgttcgatggtctggctttcgttaaagcggaagtggcaaaccagctggttggtctcggccagtttaaccatttgcggcaaagtcagctgcgccagcgcatcggccatggtttcatcaatacccaggcgaaacattgcggacgctttttcatcgttgatcaaacgctgtgctaaaagtaaatatgacagattgatgtcataaatatgcttaagtaattcagacgtacccatattccccatcccgacagactatgtttaaaaacatacgctgggtgataaattttatcgcccgtgacttgggttgtttcccaaagttggcaaattaatctctcaaaaacgactgctataattttcgacaatcgctaaattcgaccactgttcagtatttgctacgagcgtaaaccaacgtgtatggatgtacagcattctgcttcgatagtgtttagtcaccatgaaactatttttacaaatttaataagattattcctaaagcagcgcaactctacccccgaaccattagcacacacaatgtaagtgagaggcaattttaaatacaatgtgacatagatcacaaaaataaaaaataattaagccaaatacccccaaatacgctcacttattgaccgccattttgctcataaaacagccataggtaaaaaaacgtcttaaaaacaatgtttatccgccaaaaaattatcttttttagatcaattcgaacaaaagcatcaccaaaccaaaataacagaacaaaaatctgcatataggcaacaaactcagtataaataaccatttgagttactaaaaaatatccaagctgaaaaataaccaatgtaaactataaggttattagctatcggatttgacttaagccttcagcctgaggctgttctaattttcaacatcaggtgattatggcttatcaatgattcgcaggcgtagtgaacaagccaacagacgtaacgatatgtttccgtattagcacgatgcaagagtgctttttttgagttaaattcccccaaaacgttatatcggcagcaattcataaaactttaatgctttttatttctttttctgacgccgagataattccccctcccctcagagattatttacatggctttggctttcattgcttcattgtcataaaataaaacgcagttttgttttactgttcatatttcttcatcgaacaaaacggctttgcaacgcaagcagcggcgacaaacatcgcccaatgccgcggcggcgccacggccgggtgaaaaaatcagccaaaagaggcccggcacggcaccttgtgcttgcccacagcacgaacgacgacgcgtcgaccgtcaaccgccctgagactttccctatttctccattaatcagcaggctgagattgctgacggcgcactggcatattatgatttaccaaagcgccgctacgggcggcgcgacatcattacccagtgcaatttatttaattgaaatgatttttgtcaggtcgtacatcgctgcctcgacggcgtcgccgtgagtcgctatgtgttattcacccggctttaactattaacaggctatattttaatcatgaccgatacgctcgaatatctgctgacatttcgtaaatgctcctctttggacagcctggagaaggtgtacgacaaactgaactactccattgaaaacgatacggaaatgagcaatatgtaccgtgccgccgaccaccgtcgcgccgagctggttgccggtaaattgttcgatctgggcaaggtgccgaaaacgctgtgggcacaggtgctttaattcagtgaaattacgtgcggcaacggttttatcttttattgctatataaccggggcacattcagcttttattgccgcgcgtgatatgaaacacatttattccccccgccaggttctaccctttatccgacgcagtacttccaccaaggccgccgctgcagcagcctgaaacacgatggatacaacaaggagtcggatatggggtatcaaaacgttctggttaccgtcgccgttgcccctgacagccatcgcctggtggaaaaggccgtctccatcgttcgcccctacggcggcagcatcaccctgttaagcaccctcgccaatccggaaatgtacaataatttcgccgggccgatgctgggcgatttgcgctcgctgatggaagaggaaacccggctgtttatgcaggaactgcgccaacgcgccggctaccctatcgccgatacgctgatcgtgcatggcgagctgggtgacagcctggcattcgccagccgccgtcagccgtttgacctgctgctctgcggcaatcaccgagacagcatgatgaacaaagtctcctgttccgccgcccgctttatcaatatcagtcatatcgacgtgttgattgttccgctctgagctaagcacattcggtcacgtcgcctcagcgctcctgcactaggcttaacggaccttgtttgccgcaccacaaaggagctttcgatgtccccttctcaacagaaccgccgcttcctgctggcctcgcgtccgaacggcgaaccgacagcggcgaacttccgtctcgataccgtccccgcaccgcaacccggcgccggccaactgctgttgcgcaccgtatatctgtcgttggatccttatatgcgtggacgcatgagcgatgccccctcctatgcgccgccagtggagatcggtcaggtgatggtgggcggtacggtatcgcgcgtggcggcctcacagcatcccgatttcaacgtcggcgattgggtattggggtatgacggctggcaggaatatgcgctgtccgacggcagcggcctgcgcaacctcggcccgcatttgccgcacccttcccgcctgctgggcgtgctcggcatgccgggatttaccgcatacatggggctgctcgatatcggccaaccgcaggcaggtgaaacgctggtggtggccgccgccagcggtgcggttggttcggtggtcggccaaatcggcaaactgaaaggctgccgcgtcgtcggcgtcgccggcggtgcggaaaaatgccgctatgtagtggaagagttgggtttcgacgcctgtatcgatcaccgcgccccagactttgccgaacggttggccgccgcctgcccacagggtatcgacatctattacgagaatgtcggcggggcggtgttcgacgccgtactgccgctgttgaacaccaaagcgcgtattccggtatgcggcatcatcgcccattacaatgccaccgggttacctgcggggccggaccgcttgccgctgctggaggggctgatcctgcgcaaacgcatccgtatgcagggctttatcatcttcgacgactacggctcacgctttgacgagttcttgcaacaaatgagcagttgggtcgaacaggggaaaatcaagttccgcgaagacatcgtcgacgggctggagcaggcgccgcaggcgtttatcggcctgctgcaaggcaaaaacttcggcaaactggtgatccgcgtcgccgacgaataacccgtagcagggcgtggtacgccacgctctgcttttaatgtacggcgccgtcgccgaatcgcacatcttcctctaccgtcagcgtcacctgaacgacagtgcgcaccgcttccaccatcgtcgccagtgccatgctcggcttgcccgggtgcgctgccgccagttcatggctgtacggaatatgcacgaacccgcctctggcccgcgaatgctgcatctccagatagtgacgcagaccataaaaaatgtggttgcagttgtaggtgcccgccgtataagagaccgccgcggggatcccctgccggcgcagttgctgcaccgcggccttgacgggcagcgtactgaaatagcccaccggcccgccggcaaccaccggcacgtcaatcggctgtttaccggcattgtcgggaatgcgggcatcgatcagattgatggctacccgttccagggatatttcggcccggccgccggccagccccagacagatcaccgccagcggctgcaatgcctcaatcgccgcgatcaactgctggttggccacgcccaatacgcacggcaactcgagcaccgcgatctccgcgccggcgatacgctctccggccaatgcctgcgcgacctgccaggaagggttcaccgcgtcaccctcgaacggctcaatgccggtgattaacactttgttcatcatttcccctgattgaaggctacattcgtgtgctaccagcctagggaacgctgtaagattctggaaatggattatctgtatatagagtattcataaaatgaatttagccaacgtcgatctcaatttactggtggtgtttgaagcgctgtatcagacgcgcaacgtcaccgccgcaggccggcgtcttaaccgcgcgcaaccttccgtcagcaatgcattggcgcgactgcgcattcttctgaacgatccgctgtttgttcgcagcggcggcggcatggcgcccacgccgcgcgcccaccaacttatgccacagatacagcgggtgcttgagcaaatccatttggcgttggccccgccggcccgtttcgatccggccaccgccgggcagcggcgttttacgctggccgccggcgactatgcggatatcttgctgctgcccgccatcatcagccgtttgcgtcaggcggcacccggcatcgatattcgcgtttcgcgcctggatcgccacaatatttaccggcaactggatcgcggcgaggtggatatcgcgctgggagggcacctttccggtgcggaaagccactatgtgcgcacgttgtttgaagaacatctggtgtgtatcgccagccgttcacacccacagctggcggatggccgctgggatctggcgcgctacctcagcctgccgcatgggctgtacgcaccggcagacgacggctctgccagagggttggtcgaccggcgtctggcggaaattggcggtcaacggcgcgttgccgtgaccttttcgcacatcgtcgccctgccggcggtggtcgccgacagcgatctgatcgccaccctggccgccagcgtggcccggcgtttttccgatccgcaacgcgtacgcattctcccgctgcctaaggagttggccatcgcgcctttccccattgagctgatcgccggccgacaggcgcaacgcgacccggccttaatctggctctgtgacctgataagccgactttccctcgatccccttccgcgctaaccgcatcaattgctgctttatcaaccattcagactcaccgtcggaggcccgcaccgcgggcttttcacgccggccaaataggaatcatccgaattaacattcggtaaatttatatatttgatcatctttaactaacgaatggtaaggataaaaaatactcagtgacttttttcacggaaaaaaagagttgttttataaacacgttgacttaagtgttacagatttattatttggtattaccatttgaccaataatttgggataaaaaaagatctgcgcgtatctatatgttttagataataaaaaaccagatcgtgagcgagttaacgaattgagcattgatccacaaggctattttgcaaatgcagagctctattgtagactgcacaaatcgtgcctttgtgtaaactttgttaaatctttcgtcagcccctgtctcaattcgtgacagatacgccatcgggatcgcgcgtcaaatctcgtgcggtagctatgcctaaatcggggatatagtatggatcgccttatcattgcgcacacgcctttgcccgccaatcagctgttgttcagaagcctttccggtgaggaaaaactggccggcctgttcgaattcgacgtcgagctgctcagccccgacaatcggctcgatctgaaagcgctgctgggacaaaaaatcacgctggaactgcggggcaatccgttggcgccgcgttatctcaacggcaatatcacgcgcatgaccctctccggacgagaagccggcggcaaccgttactatatctaccgcgccgtgctgcgccccacgctgtggtatctgacgcaaaaccgcgattttcgcatctaccaggaacagaccgttcccgacatcctgactcaggtgctggggcagtatcaggtgaagatcgataaccgcctgagttacgactaccgcatctgggggtactgcgtgcagtaccaggagagcgatttcgatttcatcagccgcctgatggaacacgaaggcatctattattatttcacgcaccagcaagacggccatacgctggtgctggctgacgcgccggcggcccatcaggaactcgccggctacgccagcattccctatcagctcgcggaaggcggcctggtggaaaacaaagacagcatcaacagctggagcgtttctgacgccatcacgcccagcctgtatagcctggatgactacgattttcgcaagccgcgcgcgcggttgctggaggcccggcaaaatcccgcctcattcgcgcaggacaaagcagaggtgttcgactggcccggccgttataccgatcacgcccatggccagttttacgtcaaggttcgccaacaggagttcgaagcgcagcatgagcagatgagcggcgaaggcaattcgcagggcattgcgcccggctatcgttttcaactgacccaggcgccgcgtatggaagacaaccgcacctacctggtggtcagcgcacattacttcatgcaggagaacagctacaccagcaacgataacgatgtcggcgaacagcgaaccgaatttcaggtcgttccggcggatatcaattggcgcccggcgcgcaccacgccctggccgaaaacccatggcccgcaaactgccgaagtggtgggcccggaaggcgaaagcatctggaccgataaatatggccgggtgaaactcaaattccgttgggatcgccacggcagcggcaacgaaaccagctcctgctgggtgcgcgtctccagcgcctgggccggctggaaatacggcgggatccagatcccgcgcgtcggtgaggaagtggtggtcgactttatcaacggcgatccggatcgccccatcatcaccggccgcgtttacaacgaagacagcatgccaccgtgggatctgcccggcgacgccaccaaaatgggctttatgagccgcagcaaaggcggcggcgtcgacaacgccagcttcctgttcctggaagactcgcccggcaacgaatctttcgacatgcacgccgaacgcaacatgaacatgacggtggagaacgacaagaacgtcaatattgacggcagtcgcaccaccaccatcggtcgccagcaggacgacaccgtcaccggcgacgccacgttcctgtacaaagcgaaacgcaccacaacggtcaatgggctggaaaccgccaacctgaacgctcaccagacggtgaacatcaaaggcggccgcgacctgacgattatcgacggtggcgataaaatcgacatcaccggcaatcagtccttcaagctcgacggcgcgcagacgcaaaacattacgcaaacccagcatgtcacggtgaaaggcaaccagaccctcgacattaccgaggggcaacaaaccagcaccatcaagcaagggcagacggtcaacatcacctccggcgggcagcacaccaccatcaccgccggcgggcaggaattgacgattaaaggcggcggccaaaccgccaccgtaaccggggatgtcaccgagacctacaaaaacgatcagagcaccacgatcaccggcacgctgaccatcaaggcgaaaacgatcaatatcaccagcgcggacggcgtatcggtgcagacaccgagctggaaagataactgccacggcttgaaatgggtggcgaccggggccaacttcgccttttacggttcaaatcttgcgttgacaggagccagcctgaaacacacgatgctggatatctcgcacaacccgctgtcgatcagcaaaaccaatttcaagctcagtaatgatcccatgacgttcacgcagcttggcgcgctggtgaccaacggtgccttacgattgagcaccaaggcgctggcgatcttcttgtaaagggactcccatgtcgaaggccaaaaatgttttcaccgtgatcggtttgattttattggctcccattctcagcctggtgggctttttcaaattcatcacggtcgatatctggggttatttcaaacatatcggttcttccctcagcgtgatggagaacggtatttccgcctcagggcaaatcgtcagcattcgccagaccaacctgtgggacgggaatcggccggtctgcgaagtcgaagtcaagtacatcgcccaagacgggaaaaaccatacggccgtggcgaaaggcccgatcagcgtcgtggatctgccgcgttatcagccgggccatttcatcgcgataaagtacgatccgaagaatcccaaaaaagcggtgatcgaagagctttcccggctttgagcgaaaagcatcccttcaatcacgcgatccgatttcaacgttccgtaaacggcttaccgttcatcagttcgcgaaatcaccttgcataaggaagtgtcacgatgggcacgttcattgccttttcgacgcaggacagcctctggggacaagtcctgtttaccttctttggcatcctggttggctgcgtattgctcgctgcgatcggcaaaacctttttgtcggccaaccgagcggccacgttgcctgtgcggctgctgatctttgtcgcgctgatgctggcgctcctgaaatacaaccagcaggtgatgtctgcggtaaatgcccccgcagaactgatcggattgctgatttttcccggctttttgatgagttacctgggtgcggcgcccaccggcagactggcgctggcgatagagctgccctgttttgcggcgctcgccgcgctgctgatcctgggcaccaatgacatcggcttctttgcgccctatcacctggagagcgccggccaattgatcgccaaggcgatcgccgcggcgttgtccgtggccgccgtgctgctggctcgtggaataagcggaaaggacaacgcactgtcctcttgatcatccatttcgaagcggggcgctccccgcattggcgatcggctctgaacgccgcatcattttcttcatctgttgtgacatagcctgatatctattaaaccgaaaaacggattgtttttgagcaagcagcctggctgccggctgatatccacaggaagctttacacacacaatgaaagtcgtaaaacctctgcgcctcagcgcgcttcatcgtcccttctcttggcaagggcaaaaccatctgggcgtttccgttttggccttggccgacatgggggcagccccgcgcctgcgtcccgaaccggagttgtggcagttggccgccgacgaactcacgttgagcggcggcgtgctcgatttggctatcccaaaagcctgcgcggagtttctcgccaccggcaatgcctacacccatcatcaacaagacaaaaccgcttgcgccgtgaagatccagcttgattcgctggaaaaaacgctggtggttttcggcgatcgccattggatcaacgatcgtccctctactcccctccctttttcagaaatgcgtctggactggcgccgggcttacggcggcgcacagttcgccgataatccgcacggcatcggcgccaccccagaaacatttccgcaaggccgcatccatcgtctacccaatgttgaacccctgcaggggcgccttgcgtcttctcggcaaagcgcgcaaccggcaagctttgacgcgttggatatcacctggccgcgccgcttctcccgcatcggcaaaaactacgacgccgactggttgaaaaacggctttcccggcttcgccaacgatatcgactggcgcctgttcaacatggcggaaagcgatcagcagtttcctcaacgcgacagcttgccgccccgggccgcctatcggatttggaacatgcacccttcagaaccggtgcagcaagggcatttgccgccgtggcgcgcgcgctgcttcatcaaccggctgcgcggcggcgaaacgcatttcgaagagatcgcgatgcgccacaccaccgtctggttcttcccccatcgggaacagatgctgctgatttatcagggcagcgcacgcatcaatgaagacgatgccgccgacgtgatgcagctgatgccggccctggaaaccgaaggcgaaccccgctccaccgcgcattatcggcaggtattggcccagcggctggataaagaacggggtgctctgcacgcttttcgtgagcaagagttgttgccggaggcgtgcatcggcgcctggctggatacggaaacgccgacgcagcaaagcccgatggcggaaaatatcgccgcctacgagcaccagcaacgcgaagagcatcgccagcgtctgctgcgcgaggagcaagacattgatgaacttttcccgcacccgtcgcaagaggcgccgccgaagctggaccagctcgccgaattcgtcgagcgtctggaaagccaggccgaggcgcagtatcaggacatgctcaagctgacgcaagccgagggtatcgatccgctcaatcccggtggggatcacgtgccgccatccggtgcggaaagctaccagcagcaacgcgatctgctgttccaggaggcacgccggcatcctgacgcatttagcgataaacagcgtggggaaagcgaacgcgcgctgcaccaaatgtatttaatgtcggcacaggcgcaaagccctgcactgcgcctgcgtggcgatctggcgcaaatcattcgccaacgcgtcgccgccgccatgctgcgcgataaggatctcagcggcctggatctcaccggcgccgatctgtccggcatggatctctgccaggctaacttgcgcggcgctttgctggaaaacgccaatctgcgccaaacccaattggtgggttgcgatcttcgcgaggcgatgttggcgcgcgccgatctcagcggcgccgtcttacagcaggccgatttgagccacgcctccttagccctggcgaaatgtgaagcgacggatttcggcggcgcgcagttgcacgaaaccaacatccagcaaacgttgtttcaacgctgcgatttcactatggcgtcgttacgcgacttgctggggtacgaaaccctgctcgggcagtgtgacttcaaccgcgccacgctggccaacattacgctgatggagctgcaactggagcaactgacattcagccacgcccggctcgacaaagtcagcttcgtcaaatgccggctgctggcggtgaacttcgatcgggcgcggctagagagctgcgcctgggttgataccgagacgcaaagcctcagcttccgcgccgcacgcctcaccgcctgcgccttcgcggcaaagacgctgttgccgcaggcggatttcagcgacgcgacgctgaaccagtgcaatttgcgccagatgccgttgcagcgggctaatttcagccgtgcgcgcctcgacaactgcgacctgtcggaagcccggctgaacgaggccgatttccgtcaggccaacggcagcggcagcctgttcattcgctgcgatctgtccaaggccaacctgcgcgacgccaatttcatcgcggcgatcctgcaaaaatgcgtgctgtcaggcgccgacctgcagggcaccaatctgttccgggccgatttgtcgcagtcgcaagtggatcaggcgacccggctcgacggtgcctataccgccagggtgaaaaccttgcctcgccacaacgggaaggaagtatgacgtcaaaacctgagcagatacgccagcgcgtgaaacgcggcgagctgattgccggtgaggatttgcacggcctgtcattcgccggtatggatttggccggcggcatgttcaacgaactgaacctgaacggcgtgaacttctccgattgcgatctgcgcgacagcgtcttcagcgattgtcggctcgaacacgctcaatttgcgcgggcgaacctgaagcaaacggccttcaatcagtgcgccatggcgggcggccgcttcagcgagagccatatcgaactgacgatgttcaacgactgccggcttgaacagagcgactttagccggctgtcgctcaaccaaagccactggatgtcatgccaattggccggcgcgaatttttccgccactcagcacgatcgcaccaccttttacgaaagcccgctcgacggcgcagatttaagccatacgaggctgtcacttgtcacgttctttcgattaaatctctgtgaaacaaggtttgaaggggttgatttcgaccgcgtcacgtttttcgaatgtgatcaccgcggcaaaagttacgccgggcagcgtctcatcgcctgccagtttaccgataaccaactggacgacgtcgatttcagccaggcgacgttgcgtcaaagcaacttcaagggcgcttcgctgctgcgcgccaacctgacgggcgtgcaagcgcagcagtcactgtggctggaggccaatctgacccacgcgcagtgccgcaacgggcagttcgatcaggcgatcttcagcgaagcgacgctggacgccgccaactttagccaggcgcgcctgtatcaatgcgtgttccagcgcagccgcgcggcgcgctgtgatttcagcgacagcgacctgacctacgccgacttctgttacgccgacatcggcgccgccgatttccggcgcgcgcgttttatgcgcacccgcatgcaccgcgcccaccagcagcaaacgcgctggggcgatcgcagcgggatcctcgagcgcgacgaagaactgtacgccgccgaaacctggagcgcacagcgccagagccgaatctgaatgcattgaccacttcacgaggggatcaccatgagcgttgccaacacaactcgcgccgtcaacatcgcaccgccccagcaggccgccggccaggtcgtcaacctgttgccggacggcagcctggtggtggagtgcgaaggccgcggctggcattgccgccgggcggcgagctgcctgctgacgccggccctcggcgataacgtgctggtcgccggttgcggccaccagctgtgggcgatcgccgtccttgagcgcgcagagccgcaaagcgcggcgcggctctgcgtcgcaggcgatctgcacattgaaacgccgaacggctcgctgtcgctgcacggcgcgcaggcgctgaacctgagcggcgacgccatgacgctgcaagcgaacagcggtgactgccacgtcgacaagatgaaatacagcggcgaagagctgtcggccttcgtcagcctcagccgcctggtcggcaaacgctgcgagtcgctgtggcattcggtcagccagatcagccattcgctgttccgcaaagtgcgccagaccgagcacgtgcgcgccgggcagctggattaccaggcggaagattacgcccgcattcatgcgcgcaacacgctgattacctcgaaagacatcaccaagctggattcggaacaaatccacgtcggataacctgcggaggcctttatgtttgccaacagccaaatgatcggcgtggacctggcgtttcccgacgtctgtctgacgccaagcccggcgccggtgcccgtgccttacccggatatcgccctggcgccgaccgccatcccgaatgcgttcaacattctgttcgtcggcaccccggcgcacaacatggcgacggtgacgcccctgaccaacggcgacaaccccggcgtggccaccggcgtcgcttccggcacggtgatggggccgtcccgccacctgaccggcgcctttaccgtgctgctcaaaggcaccccggccacccggttgaccagcctcagcctgcagaattccaccaacgcgctcggcatgcgcatcgtgccgagccaattaaaagtgttgctgcttgcgccctgatgacggcgccttattacacagccattcaatcaagaaaaagaggacattgtgaaaacacggattaccctgacgctgctgaccgccctgatgcttgccggttgctccaccccgccgccaccgccgccggcgctcaataacgacgccatcgtcagcagtgaagtcaatggcgtcacgctaaagcaccgcgccgcggtgagcgcgccgaaacagttcaagccgatcggtgaggaataccgcagcctgtacgccgccagcatcatgagcagccccgattataccggcaccgccgtcggcagcctggacaacgccgccgcgttctacgcgctgggcgaagtggaaaacaactggctggcgatctccgccattcgcggcggcgacctggtgggttatatccaggccaacgccggcgtgccggaagcgcgctacaaatcaacgctgcgcaaagatctgccgcgccgcgcgcgcgccgccaaacaggactgcgtcaaagtcggcggcgacagcaaggcgtgtaaaaacgccggctcagccacctggatcctccagtagtcagtacgcctgcgggcgacgagattcccatgatgacgacccctatcgcttcccgctggtgcgggatgctgtttctgctgctgggcgcgttggcgctcggcggttgcatgtcttccgccaaaagcgtgccgtcgcgctacagcctggtgttcgatgccgatcgccaggtcaacgccgccgccggcgcgcaaccggcgccgataaaaattcgcgtgctgctgctgcgttcggatgcggaattcatggatgccgacttcttcagtctgcaaaacgacgccaaaagcgtgctcggcaatagcctgctggacagcgatcagttcttcctgacgccgggccagaccggcaagacgctcggcgggcaaagcgcattggacgcacgttacatcggcgtgatcgccgagtatcaaaacctggacggcaaggcctggcgcatttcgctgccgctgccggagcccaccgaaaccaatttctacaaggtatggcaattctcgccggatgagctggaagcgcatatcgtcgcgggcgtgaatggcctgcgccccgtaaaaaaggtcgactgatctaccgctgcgctgaagcgaagtaactataggtgtgatgatgaaagatgctcataaggttgtctggactgaggggatgtttttacgccctcaccatttccagcaggcggaaaactatctcgaaggctatatgcgcaactggggccaggcccacagcggctgtttctgggggttcctgaccctggatctggaccaaacgctgctgcgccagggcaagattgcgctcaacgccgccagcggcatcatgccggacggcacgccgtttcgctttgccggtgcccagcaggcgcccgcgccgctgagcatcgccgaaaacaagaccggtgaaaacgtggtgctggccctgccgacttaccgcgcagggcgtgaagacgtgatctttcaggaaagcccggaagcgctggcgcgctatctggcctacgagaacgaagtcgacgatctcaacgccgtctcggtgggcagcgcggcgctgcagttcggccgcctgcgcctgcggctgatgctggagagcgagctgaacgccgaatggacggcgctcggcgtcacccgcgtgctggaaaagcgcggcgacaacagcctgcgtctcgatacggcgcaaatcccgccgatgctgaactgtcagggcaacccggtactgaagaccttcatcaacgatctgcagggcctgctgcaacagcgcagccagcagatgagtcaacgcctgctgcagccgggccgcggcggcagttccgaaatggtcgatttcatgctgctgcagctgatcaaccgccatctcggtcaggtgagccatgcctaccacctcgaccatctgcacccggagcgcctgttcgccgattggctgcagttcgccaccgaactcgccagcttctcggcgcagcgcaccccggaaggccgcctgccggtgtacgaccacgacaacctggcgctgtgcttcggtaagctgatgctgttgctgcgtcaaggattgtcagtggtgctggaagacaacgccattcagctgacgctggtcgaacgatcccacgggttgaacgtcgccaccgtgcaggacaccaaaatgatgcgcgacttcggtttcgtcttggcagtgcgcgccgacgtggccgccgaggtgttgctgacccacttcccggcgcaaatgaagatcgccccggtcacgcgcatccgcgatctggtgcagctgcagctgccgggcatcggtctgcgcaccatgcccgtcgcgccgcgccagatcccttatcacgccggctatacctatttcgagctggaaaaaggcggcgacctgtggaaacagatggaaaaatccagcgccttcgccctgcacctggccggcgaattcccggggctggacatggaattttgggcgattcgcagccatacggaccggtaacctatgactcaggaaaatagcatggcgccgggggccaatccgctggtggacgccgccaacccgctgctgaacgccatttcgcagatccgccagtcggccacgcacgccaacccggcgcagctgcgccaacagctgatcgacgaaatgcgccgcttcgagatccgcggccaacgcgccaatctgccgtacgaagtgatcatcggcgcgcgttattgcctgtgcaccgcgctggatgaagcggcggcgctgaccccgtggggcagcaacagcgtgtggtccggcagcgggctgctggtgaccttccataacgaaacctggggcggcgaaaagtttttccagctgctggccaagctgtcgcagagtccgcgtgagcacatcaacctgctggaactgatcaattattgcctgctgctgggctttgaaggccgctatcgggtgatggaaaacggccgttctcagctggaaaccatgaaacagcgcttgctgcagctgatccggacggtgcgcggcggctacgcccctcccctgtcgcctcatgcgttggatctgccggtacagcaaaaactgtggcgcccgctggtgccgctgtgggcctgcgtggcgctgaccggcttcctggcttcgctgctgttcatcgccctcaactggcggctgggcgacaacaccagcccggtgctggcggcgatttaccaaaccaatctgccgcaggtggcgatcggtaacccggcgccggccgcgccgccgacgctgagcctgaaaagcttcctgcgcaaagagatcgccgaagggctggtggtggtgcgcgacgaagcgcagcaaagcgtggtgatcctaaaaggcgacgggctgttcgactccgccgccaccacggtgcgcgccaactatatcccggtcatcgaccgcatcgccgccgccatgaacggcgtcagcggcaagatcctggtcaccggctacagcgacaacctgccgatccgcagcgcccgtttcgcctccaactgggagctgtcgctggcgcgcgccgaagcggtcagcgcccgcttgcaaaaacacctcgccaacccgcagcgggtcaaggccgagggccgcggcgagagcaaccccgtcgcgccgaacgataacaaagtgaaccgcgcgttgaaccgccgggtagaaattacgctgttggtcgccccggaaaacacccaggcggaaatcaacggcttgccgcaaggaaccggaaagtaatgctcagtacgttattctccatcatcaccagccgcctgctgtggggctttgtcggcattaccgcgctggcgttcatcatctggatgatcggcccgctggtggccatcggcgactatcgcccgctggagccggaactcaaccgccagatcgccattggcgtcatctacctgatctggttcctgtgccgcctgatcccgcgcctctacagcgcctggttcaacagccgcctgctgagcaacctgcgcgccgccgaaacggtgccggcggaagacggcaagcccgaggttaaacaagacgatcagctggcgcagcgcttcgacgaagcggcgcagctgctgaaaaaggcgcgcttcgcaccgggccagggcgacggcaaacaccgctggatgacccgctttagccgccaatacctgtaccaactgccgtggtatgtgatcatcggcgcgcccggtgccggcaagaccaccgcgctggtcaattccggcctgcacttcccgctggcggatcgcttcggcaaatccgcgctgcgcggcgtgggcggcacccgcaactgcgactggtggtttaccaacgacgccgtgttgctcgacaccgccggccgctacaccacccaggaaagccagcgcgaagaagacgccggcgaatggcaaagcttcgtcgcgctgctgaaaaaatatcgcacccgccagccaatcaacggcgtgatggtcaccatcagcgtcgccgatctgctgagcgacagcgccgaagcgcgcgccgcccaggccagcgcgctgcgcaaacgcctgatcgaactgcacgaacagctgggcattcacttcccggtctatgtgctggtgaccaaaaccgacctgctcaacggctttatggcctatttcggcagcttcgacaaagcgcagcgcgaccagatctggggattcaccttcccttacgaacgctcgcggcagccggacttcaacctgaacgccgccttcgaacagcaatacgccctgctgcaacaacggctggatgcggcgctgccggatacgctgctgatggagcacgacgcgcgccaacgcgccgaaagctatctgttcccgcaggaattcgccgcgctgcgcccgctgctcggccactatctggaacaggtgttcgccacctccagttttgaaacccgctttaccccgcgcggcatctatttcaccagcggcacccaagaggggctgccgttcgaccgggtgatgggcgaactgaaccgctacctgcagctgccgacggccaactcaggggcgcaggccaacgcggcctgggacagcgtgggccaggaaacgccgatcccggcagccaaaggccagagcttcttcctgaaagagacgctggaatcggtgatcttccaggagtccgggctggcgggcagcaaccgctggtgggaataccgcaaccgcgccctgcactgggcgggttacatcgcgctggcggtggtcctggcggtgctggcgatgctctggttcaccagttacggcaacaacaaggcctacctggcggaagtggccgccaaggtgcccggcgtcgagcgccaggggcaaaacctgacgcaggtgggcaacggcgacatgttctcgctgctgccgttcctcaacagcctgctgcacctgccggacagccagaacttttcgctggacgatccgccgttcacttaccgtatggggctgttccgcggcgatcaggtcggtgacgccggcaatgccctgtatcaaaaagcgctgaaagagctgctgctgccgcaggtggcgcaacagatcgccaccacgctgcgcaacgataaccacggcgacgcggacttcagctatgaagctttgaaggcctatcagatgctgtatctgccgaagcagtacgacggcaaattcctgcgcgcctgggtgatgctcaacctgcagcgcaacctgccgcagggcagcacccaaaaacagctgcagcagatcgaatggcacctgagccaactgctggatgcgcagatccaggcctcgccctacgccaaagatgaacagctggtggcgcaggcgcaggccgccatcaatcgggcgccgctgtcgcagcgcgtctatggccgcctcaagcgcttgctgctgaaacagaccgacatcaagccggtcagcctggtcgatttggccggcccgcagaccgagctggcgttcagccgcaaaagcggcaaaccggtcaccgacggcgtgccgggcctgttcacctcgcaagggtactggaaagcgttcaacgacaacatcgatccggtgaccgataccctgcgcaaggaagacgtctgggtgttgaacagccagacgccggagcagaagagcgccgatttgaccaagaccatccgccagctgtacatgcaggatttcatcagcgcctgggatgagctgctgggggatatccaactggccaacatcggcaacctgacccaacgcatcagcagcgcgcgcctgctgtcaggcaacccgtcgccgatgcgcaacctgctggtcaacgtcagcaaaaacgttaccctgcgcgacgagaaaagcgacgccgattcccgctcgctgctggccaaaaccgaagacaggctgaatcaaaacgccaaccgcacgctggaggcgctgttcaccaaccggccggccaacgccgacggcgacgtgtcggcccagccggaacagctggtgatggcgcacttcgcgccgctgctggagctggcgcaaagccagggcgaaggcaataaggcgatccctttcgacagcgtgctgaaacaggtcgatgagctgtacagctacctgacggcggtgcaaggcgcggccaacagcggcatgtcggcgccgccgagcgacatcatcccgcgcctgcaggccgagtccggccgcttgccggtgccgttcaaacagatgctgctgtcactggcgatcggcgccagcagcgacacccagcgcaaagagatggagaacgtgaaaaagcgcatcagcttcgaggtcggcagcttctgccgccaggcgatcgccgggcgttatccgctggtggcccgggcgcgccaggaagtgacgccggacgatttggcgcgcatgttcgcgccgaacagcgggctgatggacagcttcttccgcgacaacctgcagggcaaggtcgacactacccgcgccaactggcgctttacccccggcgtggacggcaagacgctgcccggcggcgaaggcatcttgcgttcgttccagcaggcgcagcgcatccgcgacgccttcttcgccaacggtaccgcgacgccctcgtaccgcgtgaccgtgcggccggtgcggatggataacgacatcctcaacctgacgctggatatcgacgggcagctgttcaaatacagccacggtccgcaggtgccgctggtggtcagctggccgggcacccgcaataccaaccaggtgcatctgcagctggcgctggccaacggcaccaccgccagcctggtgaccagcgggccgtgggcgctgaaccgcctggtggatatggcgcagtcttcgggcaccggcggcctcggccgtcaggcgacgttcaatctcgacggccaccgcgtcacgctggagttcacgcccaacagcattcgcaatccgttccaactgccggccttctcgtgcccgtagccccgaaaggacatgaccatgagcactgattcaagcgccccgacgagcatcggctggtacggcaaacttccttccgccggtgacttcctgcaacgccgtttgcctgacccggtgatcaacaactgggcccactggttccataacgggctggtgaatttgcagcgcgatgcgcaggggccaaacgatcacccgttcagcaacgcgccggtgtggaacttcgtgatccccgccacgctcggcagccagtacgtgcagatgggctgcctgttgccggcgcgcgaccgcgtcgggcggcgttaccccatctgcgcgctgcgcctgttcagccaacaggattggcgcccgcaacagctgaacatggcggcgagctggtaccaacagctcggccataccctgctgaacggcgtgcgcaacggcttctccgccgaacaaatcgaccgcacgctgcaggcgatcccggcgctgcccagcccgccggcggaagcggactccgagatattgtcgattatcgggttccagcatccggacgtaccgggcctcggctggcaacaggccgccgactgtttcgatccggcgcagtacaccagcttttggtggaccaatcaggccgacggacacccgctctacacccacgtgcacagcggcaacctcaccgtgcagctgttttcactgctgttcgagcccaacggctgggcgcgccccggccgcggcggccagtacccgcaaatgtttgattaacatcgctcgttgaaggaaattttatggctatcgacaccgataccctgctggccccggttgacgcggacacgccctgcggcgacaacctggaatacgacgccgactttctggccatggcgcgcgccgccaccggcaaagccgaacagcaattcggcagcaccatcattccggaagaagcgccggattgggtgcaggtcgagcgcctcgcaagctcgctgctggcgcgcaccaaagacctgcgcgtcatgctgtatctcacccgcgcctggacccagctgcgcggattgccgggctatgccgacgggctgacgctgatccaccaggcgatactccgctactgggatgccctgcagccgccgctggagttcgacggcgaggccgacccgctgtttcgcatcaacgcgctggccgaccttggcgacaaggccgcgctggccgccagcgtgcgcgccgcgccgctgctgaaaagcgccgccggtgaaatctcgctgcgcgatgccggcgccctgctcgacggcagcaagcaagagtgccccaactttcccggcggccgcgcacggctgcaggatgagctggcgcaacaggatcgccccgaaggcgcgctggtgatgcacatcgccaacaccctggccgccatacgcagcgaagtcacccgccatctgggtgaaagcgcgctgccggaaatgagcgcgctgaccaaggtcttttcgctggtggcgctcgccggccagagcgaggccccggccgccaccgaagcggacgccacacaggaaaccgccgctgagcagccaccggccgccgtgcagagcgcctctgccccactcaactggcgcagcgcgcagatccagtcgcgcgacgacgctcagctgatgctggacaaggtgaaaaactattttcgtcttcatgagccaagccacccggcgccgctgatgatcgatcgggtacagcgactgattacgctggactttatgcaaatcgtccgcgatttggcgcccgatgggcttaaccaactggagaccattctcggtcgccccgaccacgaggagaacagctagccgccgacttttgttctcttgacgacacccgataccgtctgcccctgcgcagacccgaatcagaacctgactctcccagccggacgaggcgcgttcccaatcgccattagatggagtaaatcatgtcaaactcgaaatcccgcagcgggcagaaattcatcgcccgcaaccgcgcgccgcgcgtacagattgaatacgatgtcgaaatttatggcgcagagcgcaaaatccagctgccgttcgtgatgggcgtgatggcggatctggtggggaaagcggtcgatccgcaagccagcgtggaagagcgcaagttcatggaaatcgacgtcgacaacttcgacgagcgcatgaaatcgctgaagccgcgcgtcgcttatcaggttgacaataccctgaccggcgaaggcaagctgaacatcgatctgaccttcgaaagcatggaagacttctcccccgccgctatcgcccgcaaggtcgacgcgctggacaatctgctggacgcccgcacccagctttccaacctgctgtcctacatggacggtaaaaacggcgccgaggagctgatctccaagatcctgcaaaacccggcgctgctgaaatccctgaccgacgcgccgaagccggcggttaacgatgacaacaacgagcgtgaggattaatcgatgagcaactcgcctcagcaacagaatgcgttgcaaaccaccgagactttttccagcgatgagttcagcgcgctgttgaacaaagagttccggccgaagaccgatcaggccaaagaagcggtcgagaacgcggtgaaaacgctggcgcagcaggcgctggaaaataccgtcaccgtttcttccgacgcctaccgcaccatccaggcgctgatcgcggaaatcgacgaaaagctgtcgcagcagatcaaccagatcattcaccacgacgatttccagaagctggaaggcgcgtggcacggcctgcactacctggttaacaactctgaaaccgacgagatgctgaagatccgcttcatgagcatttccaagcaggagctgggccgcacgctgaagcgttataaaggcgtgggctgggatcagagcccgatcttcaagaaaatctacgaagaagagtatggccagttcggcggcgagccgttcggctgcctggtgggcgactactacttcgatcacagcccgcaggacgtggagctgctgggcgaaatggccaagatcggcgccgcctcgcactgcccgttcatcgccggcaccgcaccgagcgtgatgcagatggagtcctggcaggagctctccaacccgcgcgatctgaccaagattttccagaacaccgagtacgccgcctggcgcagcctgcgcgaatcggaagacgcgcgctacctgggcctggtgatgccgcgcttcctggcgcgcctgccgtatggcatccgcaccaacccggtggacgagtttgacttcgaagaagataccgacggcgcgacccacggcaactacacctggaccaacgccgcctacgccatggccgccaacatcaaccgttcgttcaaagagttcggctggtgcaccgccattcgcggggtggaatccggcggcgcggtggagaacctgccgtgccacaccttcccgagcgacgacggcggcgtggacatgaagtgcccgaccgagatcgccatcagcgatcgtcgcgaagccgagctggccaaaaacggctttatgccgctggtgcaccgcaaaaactccgacttcgccgcctttatcggcgcgcagtcgctgcagaagccggcggaatactacgacgccgacgcctctgccaacgcccagctttccgcgcgcctgccgtacctgttcgcctgctgccgcttcgcgcattacctgaagtgcatcgtgcgcgacaaaattggctccttccgcgagcgcgacgacatggagcgctggctgaacgactggatcatgaactacgtggacggcgatccggccaactcctcgcaggaaaccaagtcgcgcaaaccgctggccgcggcggaagtgcaggtggaagagattgaagacaaccctggctactacagcgccaagttcttcctgcgcccgcactaccagctggaaggcttgaccgtttccctgcgcctggtgtcgaagctgccttcgctgaaacaaaacgacgcgtcctgatggactgaagtcaggccgcggtagtgcggcctggctgatgtatcaatctcatcgtcagcctatcgcagaaaacccggctcgcatgtggaaccaagataacgcgaaataattaagcattgagccattagcacttaatagtggctcggtaacccgtaccgatagttttcggtatttaagaaggtgcatggcacaaggatataaattggtaatgcattaccacacttgcaattcctgctgctattacctgagtttttcaacgtaacgttaatactactgttaacccttaataaagagtgaagaaactatggctattgatatgttcctgaaagttgaaggtgccagcggcgaatccaaagattcgaatcacaaaggctggaccgacattacttctttctcctggggcgcttctcaaccgggcaatatgggcgttggcggcggcggtggcgccggtaaagtgtgcttcaacgatctgcacgtcaacgcgctgatcgacaagtcaaccccggccttgctgaaacactgctcaagcggcaaacacctgaccaagattgagctgtcggtttgcaaggcgggcggcacccaggttgaatacgcaaaaatcactctggaagacgtgctggtcaccgccgtgcagtacaccggtgcaggcggcgaagacaccgtgggcgtcacctactccttccaggcggcgaaagtgaaacagcagtactgggagcagagcgacaaaggcggcaaaggcgccgaaagcagcgcaggttggaacatcaaggaaaaccgcgaagcttaattgttatacaacctccccattatggggaggttggtttggcaagcgatgttttttagataaggaaatcatgatgaaagcgattagaaaaggtgacagaggaaatcacgtaaaatcattgcaagaattgcttaataaacagggggctattcttaactctgatggcatattcggtctaaagactgaattagcagtaaaaaaagtgcaacgtaaaaaaggtctgcatgttgacggcatcgctggtcgaaaaacattcttagccctgggttcacacgtcgaaactcgagcaccacaacctcctatcggtggtagtgcaggtcgtcaaggtcccggagctatgggcatttcacaaagcggtttaaggtttatctttaacattgaagcatggcgcggagtaagtaaccacctacattggcctggcggtgcaagcggggtcactctggggccgggttatgatatgaaagctcgctctatagaatcaataaaaaataccatgatcgcgattggattagacaacgcaactgcagataaaatcagtgcagccgccgggttacatcatcagcaagctaaagacttcgcgaaagaaaatcacaatttagtggttttaaccgacacacaggaaacggaactacttaaatttatagtacctgcctatgaaagagctgttaggaataaaattcttgttccactcacacaacaagagtttgatgcgttagtctcctttgcttataatccaggtggtcgactcaacaacgtcgcagcattcattaatcagagcaaaatatctgatgcaatgacagaaataaaacgtgccattacctcaggtggaaaagtgatgaaagggctgataaacagaagaaattacgaagtcgagctctatttaaatggaaactatcgctaaggaattcgccacaatgaaattatctgcatttttaattagtagcgtatttttctcacttactgcatgtgcagcagaaaaaaacgttaatgccccaacatcatcaactattgatggcttatggcaagtgactcaggtcaacatagacaatgagactacccgcacgcttagctatcaatttaacgatcctcgattactaggaagagtgatcaatatttccgctcaatcaatagaaaacaatctgccggaaaaagacgtctgcacagcgccaaccttaactattgagagaagcacgctaaatcaattcatcggcaagtcgatgggcggagataaaagcatctcggctaaaaactatgcattgaaagaaaacggccaaacagaagtctctcttttcaagatcgcttgtcactccggatcattcggcccagccgataatggtgcaggctccagctttgccgctctcaatccacaaaaaatgctggttaattggtacgatggttcgctactgcaattagaacggttaccgaaagatcctaaacctgcagcgtctttcgactgtgctaaatctacaagcgttgttgaaaaaactatctgctcagacttcaatttatccgcctatgacaaaagcgtttctcaagcttggctgttggcaaaaaagcaggcggccgatgcaggagataaaaaactggtagccactttaaacagcacgcaaaaatcttggttactgcaaagggataaatgccgtgatgacaaagactgcctggccgataccatgcaaaaacgaatcgatgaactcacatcatacgattaaaactgtattcctactcacgttggcggtattgaatactgaagcttccgccaacggaaagtattcccctgccgagtacctcagaaactacgcgcttagcgtttgtatcgccgaggggtactcagcaaaagaagtcaaaaacgatgccgccgccaccgccaggggttacatggagttcggcgattactctctggaggcacataccgccgtcagggcgctggcaaaagaatttctggcaaagccctatgacagcatgtctggggagccgatgacgatggccaagtgcatcgatcttgtacatagccaagcgttgcaagccatcatcaagaagtaccaagggaaagacgacaactgataataaatacgcatccttacatataataaatgttagtttagaaaaataggaaaggaatcctgatgcaatacaaaacaaaagcagatctggatagatctgtcgataaactcaaaaaactatcaagaacgttttcacgacagtatctatacaccaacgaatcaagagctaatttttcactggaaatagaccaacttattcagtttgcacaaagggatatcagtatacactgcacatcctactctggggcaattagtataattgaagaggaaatcaacaacctcaaacaacaagaattcagcattaatacaggtaaagccaagctctttgtcgcaataaaaaaagaaaaaagagaaagattttcaaacctggtgatgaaacaagttggttttgtcagcggcggctctcagatatttgccggaatcggaacctgtgcactttctgcaggcatggcctgcgggggcgttggcgtaccgttaatggctcaaggagcaaataatgtttacgaaagtggctattatttacttttcagaaaagataagattggcagtataagagaggcataccactacgcggctaactatctaggctataataaaaatgaagctgacatcgtttatagttccgttgacatctcactatccgggtacggtatatttagcaagtcattaagacctgactcctggcggttgtttaaacacataaatagcgattatattattggatggaaaaagcttggcacggttccattaggcgcagaggttttttccaatgccataactggctatggaatttacaaattaatcgatgaggaaacaaaacagtgatcgatgacgtcacgctttccacctactcttactcatttgtgtttttatactttttcctgtcagtcttagtatttgtcgggctttatcacctaaaacaaaaaaccaacaataaaaaatcctattctctttttgtgatggctaccatagtgaatttatttgcaagcatcatccagggtttagtgtttaactatggttctgagatactggatccaatgctcaatataaaatttcaagactatgatgaggtgtggtacgccagtattatattcgcccttacttacctgtctcaattaccaactaatctctattacaaaagaaaggctaagaataatgcgaataatagcaatgacatcacctgacatatacagtctcacgttattatattgaagttttcgaccatataatgcgttaacccaaaaaattagtcactcacattcaaagatctctcttaggaaagaaattaagtcaaactcatccagttatcgagttccactgtctggccataagatctaatcagcaggaatgccttatgcgattttccattgtaaaaaataaaagcggccaggttccgccgcagagcagttgcgattttctgccgccgggcggcaccatcggccgcagcgtggacaacaacctggtgctgccggacgaagagcgcgccatttcccgcctgcaggcgatcgtgcatatttccgctgacggcgaatgccgcatcaccaaccgtggcaacgtcacccgcgtgctgctgaacgacattccgctggagcgcggccgccaggttgaactgcaggacggcgacgtgctcggcatcgacgattaccagatcgaagtcagcgcactgcagcaacacgccgcgccgcaggctcaaccggtggccaaggtcgccgccgttgccgctgctgcggcccctgcagccgccgccaaagaaaaatccgccgcgccgatccccaacgaaatctgggacagcctggtggaagaatttacgccgaacgcgccggccgccgtcacaccgccgccgatcgccaatccggacaatcatccgctgctggatacccccgctcgcgagctgaacccggccgatccgctggcgcagctggcgggcgatgtcgatctgcgccaactgcagcaacagcaaaccgatccggccgccttattcaacaccgactccacttttgagcgtgagcatatcctggccgataccacccccagcgcgctgctggcggagcaggctgcgccgccgcgcccggctccccccgtccagaatgcgcagcaaccggaacaagagctggatccgctggcgctgttcggcggctcatccgcgcccgcttcgccagagacgctgaacagcaacgatccgctggggctgctgatgggcggcgccgtgccgctggctcagccggaggaagcggtacagccgccgtccccaccaccggcgccgatcgccgcccagccggtagcgccgcgccctcagccgacgccgccgcccgtgcagagacccgagccgcaaccccaacccgcgccgcagttcagccagcaggaaccgcctgcgcagccgccgcgtccgcgccagggcaaccgcctgggcatcgatccggttgcctaccagtccgctcagcggcagcacgccgccgcgccgaatggcgacaccttggaggggccgctgctgacggcgctgctgcaaggcgtcggtcttgacgatctgcagccgcagccacatttcgacgaacaacagatccgcctggccggtcgcctgctgagcctgttctcgcaaggcaccgtcgccctgctctcatcccgctcgatcctcaagcgcggcgtgaaggcggagatgaccatgatcctcgacgaggccaacaacccgttcaagctgctgccttcgggcaaaacggtgctgatgcagatgttcggcagccagatgccgggctttatgccgccggaacaggcggtgcgcgatgcgctgatcgacctgcaggcgcaccagctggggatgatcgccggcattcgcgccatcatcgccgccatgctgcagtcgtttaacccggaacgtctcgaagaagaagcgcgcaaggaaggcgtggcgccgcgtctgtcgctgcccgccaaccgcaaggccgcgctgtgggactacttcgtgaagaactatcagcaaacctccggcgaaatcgaggacgatttccacaccctgttcggcgaagccttcctgcacgcctatgacgttgaagtgaatcaatacaaagactcacagaccaaaccggacgcgtaatgaatatcaccatagcctctacctccaaccagggcggccgcgcctccaaccaggatcagaccggcgaggtgctcggcaaccgcgccgcctgcttcgtggtgtgcgacggcatcgccggttttccgggcggcgatatcgccgccaaactggcgcgcgacaccattttgcaaaacttcgacggcgaaaagcacctgaacgcccagagcattcgtcagcacattacgcgcgccaatgccgccatccaccagcaacagcggcagtcggacgaatacagcaagatgggcaccacgctggtcagtctgtttatcgatcgcgattaccagctggcctactgggcgcacgccggcgacagccgcctgtacctgttccgccgcggctacctgcatgccgtcaccaccgaccacagcctgatccaacagatgcaggacgccggttatcagaccaacggcatcaacagcaacctgctgtatttcgcgctggggctcaacgaagagcgcgacgccacctacagcgacgtgctgcagctggaagacggcgacgttttcctgctgtgcaccgacggattctggcacagcttcagccaggccgaactggaacagtcgctgcacatggtcaactcccccagcgagtggatcgccctgatgcagcaggcatggaagaaaaacaataacagcgataactacagcgctatcgccgtctggattggctcaccgcaggaaaccaccctgctgcattcgctggcggatgcggagcggtttctgagccgcgactgagcagcgcacattcacagcaaggttcactatgaaatattggatgccggggctcgtcgccctgatggcggtgccgaccgcgcaggcgatgaactatcgcctggtttactcccccagccagaagctggaagtgtttatcgatgacgtcaaaaacagcaatccggcaagctggtgcggcaaaagcatcccgctgcgtatcgtctcggcgcaaagccaggatccggcggtgctgaacgactttctgccgcgcgtcggcaatctgttggaaaagcagtgcccgaaagccggccacctgccctggacgctgaccgacaagcgcggagagaaactggccagcggcgaagccgccaaagcgcgcggctggaaaccggtggtcaaacaagcggcctccgagccgccggaaaccccgccgcaaccggcgatccctgcggcggtggccgtgacttctccgcaggcggacagcgcgccggctcagcgtttcagcctgccgcagggctgccacttccgcaccttctggcgtgacgaggccaacggcggctcgctgttcattcccgccggcgctgcgctgcgctgcggcgaggacgggtggctgcagggcagcggcgcggtcacgctgcaacagggcggccaaaccctctcgccgacgctatggttcctgcaaggttacccgctggcgcaggttaacggcggcgatcgcgcgctgaccgtcgtcagcgccaacgcccaacggctcattttgggcggcaacccgcaggcgccgggcagcttcctgctgctgaacttcgaaccgaagctgcacgcctgggcgttcaacggtgaagcgatcgttgaaatgccgcgcgtcgacgccgccgacgagaacaagatcaaacagcgcgtgcagcaggcgcaaaccgcctggcagccgctgctgagcgcccccgccccgctgactttcaaactggtggaaaagctggccgcagaccgggttgatcccgccagcggcagctacctgtcggttagcggcgccactcactgattataaggaaagcctgtgaaatcattagcaagcatgctgcgaggccagtcgatcggcgcggccatcaccgccgtcgaaaacgatatcaaggcgaaaccggcggatgccgacctgcgcgccgcgctggtgcaactgctgtgtctgagcggcaactggacgcgcgccaacgcgcagctgaaatcctggcaggcgctgaaaccgatcgcacaaccgaccacgctgctgctgatgcagtcagtcaacgccgagctgcaacgccaggcggtgtttgccggcacggccgcgccggcgctgctgcggcaggatcagccttggctgaaactgatggtgcaggcgctgcatcaggatgcgcaaggggcggccgaacaggcccaggcgctgcgtgatgaagcgctggaggccgctccggccggcgccgggcggttaacgctggccgaaggcgaacaagaacggcagctgcgtttcgactggctgaccgacggtgacggccgcctcgggccggtatgcgaactggcgctgaacggcgtttactactggctgccgtttgccgacatcgccgcgatccagttccaggcgccgcagagcgccatcgacctggtgtggagccatgcgctggtgcgcctgaccgatggccgcgaacaggtatgccaactgcccgcccgttacccgctggcagaaggcagcgacgacgcgctgctgctcggcaagcgcaccgaatggcaaccgctgggcgacggcacccactatgcggggctgggcctgaaaacctggctcagcgaaagcgatgaattcccactgcacagcctgcggcagttgagcttcgacgcgagcgcctgaccatgaacgataagcgcccaccccactacgacggcggcgatctgcgccaccagggctatcgctatcgtcaggacagcgaacgcctgacctcgcgcgacaaaatgcagccggtgctgctcgatatgctgaccgacgacgaaccgcagaaaaagcaggaggcgcaggtgcgcaacctggtgtcgcacagcgagctgcgccgccgggtattgcgcgatctgcagtggctgttcaactgcgtcaacagcgaatccaatctggatctcggcgattttccgcaggtgcggcgctccaccctgaattacggcatcgcctcgctggcgggcaagcgcatgtcggacatcgaatggctcgacattcagcgcgcgctgaccgaatccattctccatttcgagccgcgcattttgcccgaggggctgcaggtgcgctgcatctcggataccggctcgctggagctgcacaacgtgctgtcgatcgaaatcaagggccgcctgtggtgcgtgccctatccgctggagtttctgttccgtaccgacgtggatctggaaaacggccacttcgatctgaaagacatagggtaaggcgatggacagtaaactgttagattattacaaccgcgagctggcctatctgcgtgagatgggcgccgagttcgccgaacagtacccgaaggttgcgggccgcctcggcatgcgcggcatcgacgtggcggacccttatatcgagcgcctgatggaaggctttgccttcctcacctcgcgcgtgcagctgaaaatggacgccgagttcccgcgcttttctcagcgcttgctggagatcatctaccccaactacctgtcgccgacgccgtcgatggcgatcgccgagctgcagccggacagcagtaaaggcgatatcagcaacggcttcgtggtgccgcgcggcaccatgatggacagccagacgctgaagaaaagcggcatcacctgcagttacaccacggcgcatgacgtcacgctgcagccggtgcgcatcgccggcgtcgagctgggcggcattccggccgatatcccgctggcctcgctggggctgcagcacagcggctgcgtcagcgcgctgcgcattcgtcttgagtgctacgaaagtgtgacgctcaacaacctgcagctggatcaattgatgttttacctggccgggccggacatgcaggcgcagcagctgctggagttgctgatgcagcacagcgtcgggcttgtctgccaaacggtggaggctcagccacagcggcgggcgctggcgttggacgggctgcgacaggagggcttcgccgccgatcaggcgctgctgcccaacgatctgcgcaacttcgaaggctaccggctgctgcaggagtatttcgccttcccggcgcgcttccagttcttcagcgtcaacggcctgcgtccgctgctgcagagcgtgcgtgaagggaaaaaggggctgcgccagttcgagatcgtggtgctgctcgataggcacgacgccgcgctggaacgggtggttgacgttgctcacttggcgctgcactgcacgccggtgatcaacctgtttccgaaagtggccgaacgcatcgcgatcaacgaaaagaaccacgaataccatctggtggtcgacaatatccggccgctggattacgaagtgttttcggtgcagcggctcggcggcagcgccagcgaaaaacgctacgagcaagagtttcggccgttttacagcaccctgagcgcggacgacggcaactatggcgcctacttttcgctgcggcgcgaacagcgcacgctgtcggagcccgcccgccgctacggcacccgcaccggctacgccggttcggaagtgttcgtgtcgctggtggacgaacggcaatcgccgtggcacagcgatctgaaatacctcaccgccgacgtgctgtgcaccagccgcgatctgccgttgatgctgttgcaacaggatcagggcaacttcgtgatgcccgattcgatcccgatcaagcaggtctcgctgcgcaaaggccccaccccgccacgcccggcgctggccgaagggatgatcacctggcggctgatcagccagttgcagctgaactacctcagcatgatggacggcgatccggaacagggcgccgccagcctgcgccagctgctggggctgtacggcaacctgagcgagccggcgatcgccaaacagatccagggcgtgcgccactgcaacctgcggccggtctatcggcgtgtgccggagccgggcccgatcgtgttcgcgcgcggtatcgccatcgatctgacggtcgatgagcaggcgttctccggcaacagcccttacctgctcggcagcgtgctggagcgcctgttctcgcgcctggtggcgatgaacaccttcaccgagatgacgctctccagccagcagcgcggcgaaatcgcccactggcaggcgcgcatgggcaaaaggacgctgatatgagcgcggagatgatcgccaccgaactggcgccgccgcagatcaatgcgctgtatcggctgccggacgacttctggccgcggctgcgcagtgcgccttacaagcacgatctgtttcaactgctgcgacgcatcgacgcccagggcggccagccctatctgctggggcgcgcgccgctgccgcgccacgagatgctgcgcctgggccaggagccgtcgctgtcgttcgcgccctccacgctggcgcaggtggcgccacgcgccaacagcccgctgcacgacgtttcgatcttcagcttcggcctgttcggccccaacgggccgctgccgctgcacctgaccgaatacgtacgcgaacgggtgtaccaccatcaggacaccaccctgctggcgttcaccaacctgttccatcaccggctgacgctgctgttttaccgcgcctgggccgacgcgcagccgacggtatcgctggatcgcccggacaaccggcgcttcgacgagtatctgtcgagcctgatcggcatcggccagccggcgcaacaggagcgcgacagcatcaacgcccacgccaagcattttatggccggtcatctgattcgccacagccgcgatccggaaggcctgagcaagattttgcagcagtatttcaaggtgccggtgcgcatcgtcgaaaacgtgccgcactggctgcgggtggaaccgcgcgaacaggcgcggctcaaggccgggcgcggtgcgccgcggctcggcgagtcggcctttctcggcatcgcggtgcgcgatatccagcacaagttccgcatcgagctggggccgatgccgcagcaggactatgaccgcttcctgccgggcgccgagctgtgccggcaactgcgcgactgggtgcgccaatacctgggcatcgagttcgtctgggaagtgcgcctgatcctggcgaaggaacaggcgcacggcatccagctcggcggcgcgcagcgattgggcctgagcagttggctggccgaccatcggcgacagcgcgatctcgacgatctgatcttcagccctgaaccgctggaaaacccgttctgaccctatttcggccgacgccctgcggcgccaggccaccctgagacctgaggaaaaccatgtctgaaatcagccgctcggtattatttggcaaactggatagcctgttattcacctctctggaaagtgcgacggcgttttgcaagctgcgcggtaacccctacgtcgaattggcgcactggctgcatcagctgatgcaatcgccggacggcgatctgcagcagatcgtccgccacttcgcgttggacgaggcgcagctggcgcgcgacatcgtcgaggcgctcgatcgcctgccgcgcggcgccagcgccatctccgatctgtccgagcacatcgacagcgcggtagaacgcgcctgggtctatggctcattgaaattcggcgcggcgcgcatccgcggcggccacctgctgctcggcattctgaaaacctacagcctgcgccatctgctgaaggccatttccccgcagttcgagcgcatcaacgccgatctgttgatggagcagttcgccgtcattaccgctcactcggcggaaaacgcccaggatgcgccggcggaaagccgcgccgagaacgcatccggcgcggcgcgcagcggtgaaagcgtgctggcgcagtatgcccaggatctgaccgccagagcgcgcgacggcgagatcgacccggtggccggccgcgatgaagagatccggcaaatcatcgatatcctgatgcgccgccgccagaacaacccgctgctgaccggtgaggccggcgtcgggaaaaccgcggtggtggaaggcctggcgctgcgcatcgtggccggcgatgtgccaccacagctgcgcgacgtgaaactgtgcctgctggacatcggcatgctgcaggccggcgccggcgttaagggcgagtttgaaaaacggctgcaggcggtgatcgacgaagtgcagtccagcccgacgccaatcatcctgtttatcgacgaaattcacaccctgatcggcgccggcggcgcccagggcaccggcgacgccgccaacctgctgaagccggcgctggcgcgcggccaactgcgcaccattggcgccaccacctggtcggaatacaagaaatacatcgagaaagacccggcgctcacccgccgtttccaggtggtgcaggtgcacgaaccgagcgaagacaaagcgctgctgatgctgcgcagcaccgtcagcccgctggagcaacaccaccgcgtgctgctgctggatgaagcggtggacgccgcggtgcggctgtcccatcgctatattccggcccgccagttgccggacaaggcggtggcgctgctggataccgcctgcgcgcgcgtggcggtcagccaacacgccgaacccgcccaggttgaagactgccgccatcgcatcgatgcgctgcagatcgaattggatatcgcccgccgcgaggccaaggtcggcatcggcgatcccctgcgcccgcaggagattgaagctcagctgaccgcgctgcgcctggagctcaaacagctgaccgagcgctggcagcaagagctgacgctgatccaagagatcatcacactgcgcgcccagctgcaccggcaggaagcggaggagcctgccggcgaagaaacggaggcgggccctgacgccgacgcgctgcgcgcccaactgggcgagctgcagcagcaactgagcgcgctgcagggcgaagcgccgctgatcttcgccgccgtcgacgccaacatcgtggcggcggtggtggccgactggaccggcatcccgctgggccgcatggtgaaaaacgagattgaagcggtgctgcaactctccgccaccctgaaccagcgcgtcatcggccaacgccatgcgctggatctgatcgcccgccgggtgcgcacctcacgggcgcggctggacgatccgaacaagccggtcggggtgttcctgctggccgggccctccggcgtcggcaaaaccgaaaccgcgctggcgctggcggaaaccctgtatggcggcgagcagaacgtcatcaccatcaacatgagcgaattccaggagtcgcacaccgtttcgacgctgaaaggcgcgccgcccggctatgtcggctacggcgaaggcggcgtgctgaccgaggcggtgcgccgccgtccttacagcgtggtgctgttggacgagatcgagaaagcgcacccggacgtccatgaaatcttcttccaggtgttcgacaagggctggatggaggacggcgaaggccgccatatcgatttccgcaacaccatcatcatcctgacctccaacgtcggcaccgatctgatcgccgggctgtgcagcgatccggagctgctgccggagccggaggcgctgagcggcgcgctgcgccaaccgctgctgtcggtgttcccggccgccttgctcggccgcctgctggtggtgccgtattacccgctgaccgacgccacgctgggcaacatcgtgcgcctgcagttgggccgcattcagcgccgtctggcggagaatcacgacatcgtctgcaccttcgacgacgcggttatcgagcagatcgtcagccgctgcaccgaggtggagtccggcggccgcatggtcgacgccatcctgaccaacaccctgctgccgcagatcagccacaccctgctgaccggcagcgccaacgaccagcgctatcgccagctgcatatcgcgctgcagaaccacgaattcatttgtcaatttcaggcataacgccgcggccgccgagacggcggccctttgaacacagagagtcatcactatgtcgggaaccgggataaccaaaccgaattcgaacagcctgccgagcggctatcgattcaacgaattcgagatccaggaagcgatcggcgaaggcggcttcggcatcgtctaccgcgcctacgatcaccaactggaacgcaccatcgccatcaaggagtacatgccaacctcgctggcgaaacgcaacgacgatctcagtatcgggctacgcggcgagcgcttcggcaaaactttccaggccgggctgaacagctttattcaggaggcgcgtctgctggcgcgcttctcgcaccccggcctgctgcacgtgttgcgcttctgggaagagaacggcaccgcctatatgggcacccagttttacagcggcaccacgctgaaaaacctgcaggcgcagcagccggagaaaatcgacgaggcgtggatccgtcggctgctgccgccgctgttcagcgccatcaacaccatccatcaggaaggttatctgcaccgcgacatttcgctggataatatccagatccaggagagccagctgccggtgctgctggacttcgggtcagcgcgcaaagagatcggcaacctgtcggacgaaacggagatcatgctcaaaccgggcttcgcgccgatcgagcagtacaccgagaacagcgacggcgaacaagggccgtggaccgatatctacgcgctgggcgccgtgctgcacacgctgatcgtcggttcgccgccgccggtcagcgtggtgcgcagcatcgaagacagctaccagccgctgaccgagcgccgccccgccggctactcgccggagctgttgcgcaccgtcgatcgcgcgctggcgctgaagccggaagaccgcccgcagaccatcgacgaaatggccgagctgttgcacctgccgatcgccgatgaaaacgaaatcatcagcaccccggccgccgcgccggagaacttgctggtcgccgccaacccggccgccgctgcggccgccgccggcgccgttaccgcgcgcggtacccaattctcacgcccgatgatggccggcgccggggtcgccgcgctgctggtgatcggcgcgatcgcctggctgagcggcggcaaggacgacgcccaggccgtcgcccaaaacaccgtggcgtcaccggcgcagaaaaccctgacggagcaggcgagcgcgccgcaaaccgcgcagcctgcggcggcggaacctgaaaaagcggcgccgccggcgcaaccggtggcgttggtgtacttcaaactgcaaccgggtgagcaggtcagcctcgacggcaagccgcagcaggtgacgccgggcgaaaacggcttcgccagcctgaacctggcgccaggccgttatcagttggagatccgccacaacgatcggctgcgccgccaacagctcagcatcgacaccgccggcacctggctggtcaacccggccaccgccggttaatcccgttctgaaactccgccgcggcggggttttccctatttcatgagactgacgagcaactgccccctcattggccgcgcggcaaggccgctgcaacgccggagtatgcagggcatgacgtcaatcacagaggatgttctcatgttggatcgcattattgcgcacacgccgctgggccaggagcaactgctgttccgctcgctggacggcatcgaagcgctttccactcctttcgacttctctattgaattgctgagcaccgacgcgcggctcgatcgcaaagcgctgctcggccaaccgctgacgctggagatccctacccagggctttctcagcgccccgcgctacctgaacggcaagatcaccgccatcgccgtcagcagcgaagagatcggcggcacgcgctacgcggtgtataacctgcacgtgcagccggatctgtggccgatgaccaaagaccgcaacttccgcatcttccaggaacagacggtgccgcagatcgtcaagaccctgctggcggagcacaacgtgcagctggaagatcagctgaccggcgactatcgcctgtggggctactgcgtgcagtacaacgaaagcagcttcaacttcatcagccgcctgatggagctggagggcatctattactatttcaaacacgagatgggcaagcacacgctggtgctcggggatgcgccccaccaccaccagccttatcccggctacgagatgatcccctaccatctgacgccgtccggcggcagcaccagcgaggaaggcatcagccagtggacattgtccgatcgcgtcacgccgggcatctacagcctggacgactatgattttcgcaaacctaacgcctggctgttccaggcgcggcaaaacccggtctcccccacgccggggcagatcgacgtttacgactggccaggccgctataccgagcatcagcaaggggagttctacgcccgcgtgcgccaggaagcctggcaggccgagcatcagcagatccgaggcaccgccaccgccatgggcatcgcccccggcagcacctttacgttgtataacgccccgcacgccgacgacaaccgcgagtacctgacgctgcaggccaactatcacctgaaagagaaccgctacgccagcggcgacgatcagagtagcgaacaccgtatcgacttcaccgtgctgccggcggacgtgccctggcacccgccgcagcaggccagctggccgaaaacccacgggccgcagaccgcccgggtggtcggcccggccggcgaatcgatctggaccgataaatacggccgcatcaaggtgaaattccactgggatcgcttcgggccgaaagacgacggcagctcctgctgggtgcgcgtctccagcgcctgggccggccagggctacggcggtgtgcagatcccgcgcgtcaacgacgaagtggtggtggactttatcaacggcgatccggatcggccgatcgtcaccgggcgcgtctataacgaagccagcatgccgccgtgggcgctgccggccgccgccacccagatgggctttatgagccgcaccaaggacggcaccgccgacaacgccaacgccctgcgtttcgaagacaaggccggcgccgagcaggtgtggatccaggcggagcgcaacatggacacccaggtgaaaaacgatgagagccacaccatcgctaacgaccacacccacctggtgggcggcaaccagatcaagcgggtggtgctcaatcaggccaccggcgtcaaaggcgaatcctccgcgctgaccggcaaaacgcgcagcgacgccgtggtcaatgcctttaccctcggctccggcgaatcgctgcggctcgagtgcggcgaaagcgtgatcgaactgctggcggacggccaaatcaacatcaccggcaccagtttcaatatcacggtgaaagaggatggcgcgatcaacaccggcggccagctggatctcaaccagcctggcggcgccgcacgcaccgccgcaccgggtggcggccatcaggcggcaatccagagcgccgtcgatcagttgttccctaaagagtaggtaattggtacgccgggaaagccggttaacgccgccccccgggcggcagtaccggcaaaaacgccgtccgctgtaacccttttggcaaggagatgaataggctggcggcaaaatcactgacgttaagccaacacaacgggctgaatctgtaccgcccatcgattcagccttctttatcatttccccttcaccacttcttcaccgtctggtaaatctcgaggtcgaaatagccgtcggcttcgcagtcgttgagatagtgttcatagctcaccccctcaaccggctggtagccgctggccggcagcagcttctgatagaactcgccccacacccgctcgaaatcgccatcgctgatgcgcacgtggtagaccgcatactgcccggcgggcagcgtctgcacggtgacgccctcgctgcccgccggcagcgcgaaatcgtccgccacgctcatcaccacgtcggcgcgcagcttttccggcgccacttccgccggatcgtcccaatacaacaccagccatttgccgaacggcacgtcgtggcgctgccgccatgccaacagttgctgcgagccctgcgggatggtctgcggatacggccccacgactctcactcccaccaccttctccgccgccttatcgataatcctcacgctcatcgcccttccccctcacaatgtctcaggcgccgatttcggtacgtacgtccagcaactcggggaaaaaggtcagatccaacgcctttttcaggaaactgacgccgctggagccgccggtgcccgacttaaagccgatgatccgctccaccgttttcatatggcggaaacgccacagatggaaactctcttcgatatccaccagcttctccgccatttcataggcttcccagtaggtttgcgggttgtcgtagatcactttaaacgccggcagcagatccgggttgcgctggtagggctgcgtccagtcgcgctcgagacactcctgcgggatcggcaagccgtggcgcgccaggtacagcaagtattcgtcgtacaggctcggcgcttcgaggatcgccttcagcgcggcgtgcttttccgcgtcgttgctgaacaccgccagcatggcggcgttcttgttgccgagcaggaattcgatcgaccggtactggtgcgactggaagcccgacgaactgcccagtacgtcgcgaaactcgacgtattccgacggcgtcagcgtttccagcaccgcccactgctcgaacagcagccgctggatctgtttgacgcgcgcgaggattttaaaacagtggctgagtttgtcttgctgcaccagccgcagcgccgcctgcagctcgtgcagcatcagtttcatccacagttcggaggtttggtgctgtatcacgaacagcatttcgtcatgatgcggcgggttggagagcgggtgctggcagtccagcagttggtccaggcacaggtagtcgccatagctcatgcgtttggaaaaatcggtgacaatcgcgctttctaattcccgtttgttcatctgtgatctccgttgcgcccagcgccccatcggcctggaacgtgccgcaaagagaaaacaatagtacagaacccgccgccccgaagggcgataaacgagagatgcttcgcagatctcactcatctgcgttaacacagtgcccccaccccgctgttgtttagtaaacaacacggctgccgcctgacgactctcacaaatgcgcgatcccatgcacgcggcgccccggttgcagcttgcctgcggccggcttcccttatagattgcaggctaacggcaggcagcaaggtagcggcaaatggcaaatattcgtgatgtggcgcggttggccggcgtgtccatcagcagcgtgtcgaacctgctgaataatcgcagtcaccagatgagcgcgcagacccgtgagcgcatcgaacgggcgatggcgaccctgggctaccggccggctcaatcggcggcggcacccgcgccgcaggcgaaaatcatcggcctgctgctgccgtcgatcgttaacccgagcttttcggcgctggcgcatgcggtcgacggcgcggcgcgggctcaccgctaccgggtcttgctcggcaacgcctaccgccaggagcaggaggaggccgcgtttatcgacgatatgttcctgcacggcgtgcgcggcatcatcgtggcggcgagcgacattcgccagacccattttgttcgggccgccgagcgcggcatgaagattgtcagctacgacagcccgtttgccgaacagatggccaccgatagccggctgttcgacagcgtgtcgatggacaatatcgccgccgggcgcctggccgcacagcacctgctcgaacgcggctgccgacacatcgtgttcgccaccgaagcgacgctgaccgtcgggcgcagccacaagatcgacggttttctgagcgccctggggcacagcctgagcgaacgccaacgggtgatcgaaggcaaggccaccagcgcctacggcgacacggaaatgttcgaattggggctgacgctggcgccgcgcgttctcgcgttggcgccacgcccggacggcatcgtggcgattaacgatgcgttgggcatcgggctgatggtgggcctgcgcgccgccggcgtccaggtgcccgcagacatctctgtgatcggcatcgacaatatcgcgctggccggcctggccgaaccggggctgacgtccgtgcggccgccgctggcggagatggcgcagctgatggtcgaacgcctgatcggccgcatcaacaatgattcgcaaccgcccggcgagtttctcttcccgccgacggtcatcagccggcgctcggtcaaaaccgccggttaatacggtaaaaacgactttcccagacgatgcgcagtcggcatcgtccggatcgtcacagctaaaagcagaaaaaatagaatcgtcgcaataaataaacggcgcgacgcttttatgcacgcaacgtcgttattcagctctccgctcattgctttgggccggaccgctattattccgattaaccacatgggaaaaaccatgatgaaaaaaataatgccaaaggatattgaacgcagcgccatcaggaaattgacgctgcatatcgtccccctcatgattttattgtatttcctggcctttctcgaccgtaacaatatggcctacgccgccaaagcgctggaagataatttgggattgaccgcctcggccttcggcttcgcctccggaattttctttatcggctatttcctgtttgaaatacccagcaacgccggcaccataaaattcggcccgcgcatctggttcgccagaatattaatttcctggggcatcttcgcgaccctgctcggttttgtgcgcacgccgctggagctgtatatttgccgttttatgctgggcgtgtgcgaagccggtttctttccctcggtggtgtattacttcacggtgttcttcccggaaaagtaccgcactaaaattctcggcatgttcatcatcgtccaaccgctgtccaacgcggtcggctcgccgatttccggctttattctcaatattcagcatgactggttcgggttcgccccctggcagctgctgttcatcctcgaagggctgccgccgatcgtcatcggcctgttgatcccgttcctgatcaagaactcgcccaaggacgtcggctatctgaacgtggaggaaaaggcctggctgatgagcaacgccggccgctccaaatccggttcaaaaatcacgctgggcgacttcctcaagggcattaaaaacaagaaatacctgctctacgcgctgctcaacttcggcatggtgtgcggcatttacggcttcggcacctggctgccgtcgatcatcagcgccatttccggcggcgatatcttccgcgtcagcctgctggcgctcattccctacggcctggccgcgctgctggtctatccgtggagtctgtgggccagcaaaaccaaaaaactcggcgtgttcgccggcctcagcatggtgatcgccgccatcggcctgatgggcgcggtgacattttttaaatacgacccgttcgtcgcgctgtcattcctgtgcatcgccgccatcggcatctataccgccgtgccgccgttcctatccatgcccgccaacatttccaccggcgcggccgcagcagccgggctggcggtggtgagctgcatcggcaatatcggcggtttcgtcgctccctatgcggtgggcgtgctgaacgatctgaccggcagcagcgcgccggggctgtttttcctggcttcgtgcctgctggccaccgggttgatctgcattttctactgcgccaaacagcgtgaaggcgtcatcaattcttaacgaaccaataaggagtcaatcatgggcgatcttgcgggcaaaaaggtctttatcaccggggcggagcagggcatcggccgcgccaccgcggagcggctgatcaaggccggttgcgacatctattttcactatcacagcgacgaaagcggccccaaagcgctggtggcgctggcccattcattggggcaaaaggccgcctacggctacgccgatctcatcgataccgacgaaacgcagcgctgcgtcttggccggcgccgagttgctcggcggcatcgatatcctgatcaataacgtcggcggcatcgtcgggcgcaaatggctgggcgagatcgaccgcgccttctggcaaaccgtgatcgacgtgaacatgaccaccatgctgaacgtcacccagagcgcgctcccgcacctgaaagcggcgccggacggcgccagcatcgttaacctggcctcacaggcgggccgcgccggcgggcacgccggctcgctggtctattccgccaccaagggcgcggtactcacctggacgcgctcgctggcggcggagctcggcgagcacggcatccgggtgaatgcggtggcgcccggcctgatcctcggcacccgtttccacaatcgccacaccacccaggcatcggcggacgaaaccgttcgcgccatcccgctgggccgcgcaggcacaccggacgacgtggcgcgcgccatcgccttcctggcggcggaatacgacggcttcatctccggcgcgactctcgacatcaacggcggcatctaccgcatgtaattcagctgcgggcggcgcgcttgccgcccgcccattcaggaatcgctttatgatcaaatccgccatcactcacccgccgctgctcgccgcgctggcgcaatgcgggcataaaacccaggtgttgattgccgacggcaactacgcctgcatgacgcatgcgccgaaagacgccaccgtggtctatctgaacctggcgcccggcacgctcgccgccccgccaatcctggaaaaactgctggcctgcatcaacgtggaaagcgcggcgctgatggcctacccgccggacttcaccaacactatcgaagccgaataccggcagttgctgccagaacattgcccgatcgagcacctgccgcgcgaggcgttttacgccgcggtcaaatcggatcgaacgctgctggtgatcgcctccggcgaacagcgccgtttcgccaatctgctgctgacggtggcgccggtggtgtgaaagaggtagagggtgtgaggggtaaaatgagggggccagccccctcatgccgttacaggtcagcgacccacttctccagctcccccgcacgttccgcatcgatatagctggtggcccagccaaacaggtaagcgaaggcgaaaatgcccaccgtcgacgacaccagcgtcggcgcgaaaaacgcggcgatagcggaaagcgtataccctacgccgatcgacaacccgagcgcttcgagctggttgcggaacgctttccagttgccggttgagaaaccttcaatcgcggcgtttaccagatccgcgcctttgatcgcccaatccaccccggtgaagaccttgcctaatacccgcgcattgcgggcatactgttccgcatcgatcattttcagccaggtgacaatcgccgctttgtcctgcgccttaagctttttgttcaggcccttcgtcaattgctcgtaggttttctccgcatcttgcacgttgcggatatattttccttgtattcccgcctccaaatccttggcgagtttggcgtatttcgcgccgatcttttccgcgatatctttattgatacctgcggccaggctgacgccatccttgatggcttttaattccgcattttgatattcgacgaattccttaacgatcgtttttaccgagccgggcgattttaccggtttgccgttggcatatttcacctccatggcattcaggttatcccctctcaccacggcgataaacgcgggccggttcttattggccttatagtagaggttgtaggtcgccactccgtcttgcttttccaccttcaaatgatgaaaaccgtagtaactcccggtcgtgcgggtcgtcgagaattcgccggttttgccgttgccatgccagccgctgacgggccgatcgcgatgcgagtctgtcacgaaactgcctaacgaagaggcgccgatctgcccggcattcaggccattgttgccgcctttgccaggagttgagggcttgcgcgcatggccggtttcgatatccccgagcgccactgtcacccccttggcgttgacccccatcaccagcccccccaggccaatgtgcttcgcctgctcggccgtcaaaccggtggcggaaaggctcagcgtgccggatgggctgacgctttcaatatgcaatttcgcatccgggttaattctgcgcgccgccttaatcaccgcctccagcttcatgcgcagcgccggatcgttttggatcgccgctatctgttgctgttccgggctgttgccaacgccggcgccgccgcgatcgcgatcgccggaatggcctttatcgccgccccccggctcagggcccgtaccgcgttcagaactccagttagtcccatctcctttaccgccataattaaatccaggcatatgctttcatccttatttcgttttatttttaagatgccgatattctcgtttaacgcggattgacacgcgcattatccctatcggcaaaccgtttttagctgcccgtcatttataaaaaactgcagaaataaggacaacggatggcggctgtctggtcggtgaaacaaataggatcgcgtctgcagaacctgaatatatcgccgcgggacacacctggatggctgcgacctgttcagaagtcattggcacacaccatgaattgcaattacaatcatcgcacttgcaacttaaagagaatgctccgcatgtcgcctcaacgtataacactgcccgccgcctcggccagaacccaaaccctggccgaagcctgtatccgcaagatgacctccgccagccaaaaagccggcgcttcgcgcccttctgccagcgcctggacggcacaaactctgggcgaactcaacgccagcggcgacatctggcttatcgacggcagaaggcgcgccgagccgccgatttcccgctacgccaccgcctggccgctctggtttggccatcaatcagagcgttatgagaagccgctgttttacttcgtcaacacgccctcggtggacatgctccgcgggcttgagccggaaaccaatcgcaaggggattttcatcagcgatgcagataccggcagtgccgatttgccgaaaggcgttcaggcctggttcccgcttcagctcacggccatgccgggctggttgcctttcgatccggccaatgccagagaaaccggcgcgatactccatcacgccctgcgcgcgctctatctggagggaacgagaaagatggtgtatctcgcgaccaacgcagacaatggccccctctcttcaggggagccgtttgtcgcagaacaggcgttcaggggaatgtatcgcgtcgccaccgcggcagactcaccgttgcaggttcgtctgtgcggcgccggccgtgcgctcgcccgcgttcagcaggcggccgaggtattgaaaaactgggggattgcgtctgaaatctggagctgccccagctacacgcggttggcgcaggacgccgaactcgccgacatgcagcgccaggacagcggcggcaaatgccatctgaaaacgtgcctgggtgccgggaatgcccccgtcgtcgccgtcaccgactattcgcacctgattgccaatcagctcaagcgattcattcccgcacgctttgccgcggtgggctcagattcacgggtgcgcggcgaaatccactacccgcaggcggaatggattgcgctctgcgccctcaaactgctggccgacgagcagaaaatcccttcggcgctgatcgccgatgcgctgcgcgttctgcacatcacacccgatgcctgatcactctctggccagctgcatcgcgttgtccaacgcgtcggagaagcgtgcgatctcttcttcgctgaactggttgagaaaatgggtgttgaccaccgtgcggtagatctcccacatctttttccgcagggccttgccttcctcggtgatagtcgcgaaggaggcccggcgatcgtcatccgatcgaaaacgcgtgaccagccgctctttttccaggcgatccatcaggcgggtcaggttgtaacgctcaatcaccaacacgtccgccagctcatgcatgcggcgtgtgccgttttccccgctttccaatccccataacacgtcataccaggcgtaaaccggcagccccgcctccgacaacttcgcctctatctttctgatcatcgcccgatgcgcgcgcacaaaggagaaccacaggtcgggttgtttatctgtcatgtcatttttctcgtcaaaagcggtgagttgcaattgcaattgtaaagggatagagtggctttcgccattattgcatttgcaactcttgcacttgcaattcaataaacccctgtatcgctcagcgccttatcaggtaagtacatttggagcttttatgaaccaacccgtggttaaagcagatcttgacccgcaagagacggctgaatggcttgaggcatttgaaggcgtcaccgatatcgatggccgtgagcgcgcgcattttctgttggaaagaatggccgaagccgatcagcgaaaacacggcgatttcttcagcctggtcaccacgccctacgtgaacaccattccggcttataagcaaccgacgtatcccggcgatctggccgctgaagcgcgcatcaatgcgtttattcgctggaacgccatggcgatggtgctgcgcgccggcaaacattccaacgttggcgggcatatcgccacctaccaatcggccgcagtgctttacgatgtgggattcacgcacttcttccgtgggcgcaccgatgatttcgccggcgacatggtgtatatccagggccactccgcccccggtatttatggccgtgcctatctcgaaggccgcatcgacgaggagctgctcgacaactttcgtcgcgaatccgcgcgccgtggcctctcctcctacccgcacccgcggctgatgccggatttctggcaatatcccaccgtttcgatggggctggggccgctgaccgccgcctaccaggcgcgctacatgcgttatctggaataccgcgagctgaaacctcaccagggaagaaaggtgtgggcgttcctcggcgacggcgagatggatcaaccggaatcgctggcggcgattgcgctgggcgggcgagaaaaactcgataacctgatcttcgtcgtgaactgtaacctgcagcggctggatggccccgtgcgcggcaacggcaagatcattcaggaactggagggcaccttcaaagccgccggctggcaggtgatcaaggtgatctggggcagcggctgggacaaactgctgcaaaaagaccgctccggactgctgatgcagcggatgatggagtgcgtcgacggcgattaccagaccttcaaatcgcaaagcggcgcctatgtgcgggagcatttcttcggcaagtacccggaattgctcgagctggtcgccgacctgagcgacgatgagatctgggcgctgcaccgcggcggccacgatccgcaaaaggtgtacgccgcctaccatcaggcggtgcataccacgggcagaccgacggtggtgctggccaaaaccgtcaaagggtttggcatgggggaagccggtgaagggcagaacatcaaccaccagctgaaaaaaatgagccaggatgcggtgaaagccttccgcgaccgtttagggctgacaatctccgacgcccaactggcagagatcccttacctgaagcctgaacccgacagcgcggcggcgaagtacatcaccgcgacgcgcactgcgctgggcggctacatccctgcccgcttcggccaatccgctccgctggcgataccggaactatcgcgcttcgacggcctgctgaagggcagcggcgaacgcaacatgtcgaccaccatggctttcgtcaatatcctcggcacgctgctcaaagacgccaacatcggcaaactgattgtgcccatcgtgccggacgaatcgcgcacgttcggcatggaaggcctgttccgccagattggcatccattcctggctcggccagctgtataccccgcaagacgccgggcagctcagctactacaaagaggccaaagacggccagattttgcaggaaggcatcaacgaatccggcgcgatatcgacctggatcgccgccggcaccgcctacagcaaccacgatgtcgcgacaatcccgttctatatcttctactccatgttcgggctgcagcgggtgggcgatctcgcctgggcagcggcagacgcgcgcaccaagggcttcctgctcggcgccacctccggcagaaccactctgatgggcgaaggcttgcagcatgacgacggccacagccacgtgctgtcttccgtcattcccagctgcgtctcctacgatccgacctatgcctatgaactcgcagtgatcgttcagagcggcatgcgcaggatgttcgttgaacaagaggatatttactactacatcaccttgctcaacgaaggatacccgcagccgccgatgccggcgggcgtggaggacgggattatccagggcgcctatttgctcaaacagaacgaaacggcaaaccaagagagcccgcgcgctcagctggtcgccagcggcgccatcatgcgcgaggcgctggcggcggcggcgctgttggccgaggactttggcgtcgccagcgatatctggagtgccaccagcctgagcgaactgcgccgtaacggcatggcggccgaacgctggaacctgctgcacccggaagacccgccgaaagtcccttatatacagagtctgctggcggcgcatcctggcccggtggtggtggcgacggactatatgaagatcgtcggcgatcagatcaaaccgttcttgccggaccgcgcctttatcaccttgggcaccgacggctttggccgctcggacacccgcgaggcgctacgtgagttcttcgaggtcaaccgccatttcatcgcgatcgccgcgttgaaactgctggctgacgaaggccgtatcgcccgcagcgaggtcaaccgcgccatggtgctgtatggcatcacccccgataagccggacccggcagcggtgaagtaacgcatagcctacccacgccgccggctgtcacccgcggcgtttttcctccttcggctcggcggcgcgcggctcccgctcccccagccgcaccagcgggatatccgccagccgggtggtgtaagccggcgacagcatttcgcgcttcatttgccacggtttgacgatcccctgcccggcgaaccatacgcgcccgcgcccttcctgattcaggcgatcgagggtcgccatcagccgctcgctgttgcggcgcggcgggcagtcgtcgaacaggtcgatctgcgccatggcggcggcgctgaaatcccccagcaccacgccgcccttcaggtagcgtcgcccttcctgccagatgctctccagcgcgcgcaccgccatggcgataatgtcgcggctgtcgttgctcggcgtttgcagccgggcggtgcccatattgctgtaatacccttcgcccgccgaatgcgggctggttttgataaacaccgacacattgcgacagtagcgcttttcctgccgcagcttctcggcggcgcgttcggcgtagctgcagatcgcctcgcgcatgtgcgggtaatgcgtcaggcgctggccgaacgaacgggaacagatgatctgctctttggccgccgcttcatcttcccattgcaggcatgactcgccgcgcagctctcgtatcgtgcgctccagcaccacgctgaaggttttacgcgccagccgggtatcgcagtccgccagctgcagcgcggtgtgaatgcccatcgcctgcagctgacgggtcaggcggcggcccacgccccacacctcctccaccgggattaacgccagcagcttgcgctggcgcgccggatcggacaagtccaccacgccgccggtcccccgccatttcttggaggcaaagttagccaacttggccagcgttttactcggtgcaatgccgaccccgaccgtcaaatgcagctcgcgccggatgcgatcgcgcacccgatgaccgaacggttccagcgcctcgcagtgcgccacgccgtccagccgcagaaaggcttcgtccagcgaataaatctccaccgccggcgccatctcctccagcgtgtccatcacccggcgggacatatcggcgtacagcgcgtagttggaggagaacaccgcgacgttgcggcggcgcatctcctctttgatcttgaaataaggcgcgcccatcggcacgcccaacgccttcgcctcggcgctgcgggcgatcacacagccgtcgttgttggacagcacgatcaccggccgcccccgcagatcgggccgaaagatggtttcgcaggaggcgtagaagctgttgacgtctaccagggcaaacatggttacagcgccgcgtagacgataaaggtcaccacgccgaagatctccagctgcgcctcgtcgttgaacacgattggcgcataggcggggttcatcggcaacagccgcacgtcggggtagcgctgcagttttttgacggtgaattcaccgtccacggcggcgatcacaatattgccgtgttccggcgtcagggcactgtcgacgatcagcagatcgccgtcctgaatattgccgtcgatcatcgactcgccgctggcgcgcacgaagtaggtggcgttgggatgccgcaccagcagcttgccgatatccagccggctctcgacatagtcctgcgccggggaaggaaagccgcaggccacgcgatcggcaaacagcggtaacgtcagagactcacctggtgaaaaagcatacaaccttgaattgctcagcataatcataaccaaactgtatatttatacagtaaagcataaacaaaacgcgaacgcgcgcaaccccaaattcccctgcggatcgcgctttgccgcgtaatataataattttctgagtgatttttcctgcagattttggcgttcttcacgtgtgtttgcacacatgatacccaccaaaactgtggataattcggcactcagaccgttggcgtatcgatgggcaggatgagtgagggattgtcattgcgaacggcgccgacggcgggcgataccggacgcgcggccgtcggtctctgctgcgtacagcgccgcaaagaacagcagcaggccttgcctcagcaagatcccacgggaggaacggcggacggccttacaaaatgacgccaataaaattgcgactggcaatggcatcaatgggacggccagagacgaaagtcagtacgttatgccaggagcttgggatcacccgacaaacgctgtaccgccacatttcccctgatggtccactgcgagctgacggtataaagctgctcaaccggggataattttagcggacggaaaaatctggggttccggcgtagaaccccgaataaggaataatccttaattcatttcaggattattaattccatctaaaacctcttggcaatattcttttttataggcttcatcattacttaatgacttaaccaaaaaatcagcatttttccaaccattatcccaatgcgtatcgaatcctgactgttcatactttaatgttctagttaatgagtcttttatttgttttttatatttatcaattttctcattggttgccccacaaacatcatgtgcaacacgagcatttgagccagaaaaacctattgctgaaattgccatcgcttcatttgatttgtcgaaatcattcgcatatgccacagcattagataaagcgaatatgacaagagcaggtatggtttttttgtatgaaatcatctttcacctctaactcattgattgttcatggggtcagtttggatatagaaaattattgtacattaaggctgctttttaatcagtctcaacttctttatagaaggcctgaatgcgacaaacttgggaagtactgcagcctgtcgcgtctgctgtttctcggatgctcagtttcttaatctgtcggtagtgcctgatccatcctgctcgctccatctcaccgctggcgcgcacgaaataagtggcattaggatggcgcaccagcagcttgccgatatccagccggctctcgacatagtcctgcgccggtgaaggaaaaccgcaggccacacgatcggcaaacagcggtaacgtcaggggctcacctggtgaaaaagcatacaaccttgaagtgctcagcatattcataaccaaactgtatatttatacagtaaagcataaacaaaacgcgaacgcgtgaacccccctatcccccgtcagaacacagtttgacgcgtaatataataattttctgagcgatttttttttacgcctgctaacggtttcactctgccttgcacacacgttatccactaaaactgtggataacatgctgagctgcagtggcgtcttcagaacatgcgccgtcgcctcaccgctccgccgcggccaggcaaaaacgatgcaccgcttcaaccatctgatcgaggcccggctgctcgaggggataatgcccggcgttctcgagcatcacggtggtcaccggcacccgccgaatgcgccgcagaaacagttcactcaggtgcaacggcgtccagcgatcctgcgccggttgcgtcaacagaaccgggcaaacgtcgaacgcttccggttcaatggcgggtgcatactccgcgtacgaggccaaaaaccgcatcgtcacccaggctcccgccgaggtgttgtccgccaggcacgccttgagcgccgccttgtcattgaccagcgcatgcatcttgctcgccagcgccatcggcatcgccatacccgccagcggcgtggcggccgtcagtcgcgccaacggaatgcccaggcgacccatcaacagattcaatgccgtctcgtcgcgcacctgctgttcacgctgatcgagaaacgtcatgccgacaatgcctttcacctgccggttcaacgccgccacgtggtaagtctccatcccgccggcgctcaggccgtacagcacaatcggccgcgcatccttcgcccgttccgcgtcgatcagatcgctgccgatctgcacccagtcgtcgtaacgcacgcgccgccgttggccgcccatctgcgtcattccgtaccccggcatgtcgacggcgatcgtctctatcccccggcgcgccagcggcgctcccaggatggtcgacatctgtcggccgttggtgcccaccccatggaacaggatcactttcaccggcgcctccgggcggcgatagcagtccagatgaatacggtgctgccgccagggccaccacacctcggtcggttcttcccccggccgcagccgaaaattttccggcaggaatcgttgaatctcctgccagtgagattgattggcgtaattctccatacgaaacctctggcgttatggcgcttggttgacgggttcaatttcagtataatccaacaaatgtcggatcattaaaatacaacttatgtcggaaaaagcgatgccgcaagcaaaaaaaaatgtgcgcgtgccgattcaggaacgcgcggcggcgcgcatggccaaagtgctgagcgccgccgaacagatgctcgccaccctcgggccggaaaaaacctccattcccgctctggcggaagcggccgatgtgccgcgcgccgcgatctacccgttcttcccggacaaatacgcgttgttttcacacctggctcagagccatatggcgcaactggcgcaggcgctgcgtgaagcggagctcgagagcgccgacaccctgcacgattgggtggatgccgccgtggcggccaccgcccgctactacaacgcgcatccggcggcgagcgtcttgctgctacgcggcgcgttcaccgaaccggagcaagaggcgcacgccgccaagaacctgacgatcggcgagatgttccgcgccaaagtgcgcgagctgcccgaacttgatgcgctgccgtcagatcccgacgtcgtcttgatcgccatagaattggcgttcgcctgcatgaaatacggctatgcgcgggaaggcaccgtttcgccggccatttgccgcgaggcgacgcgggcggtcacgagctatctcgggcagtggcgcgccgcgccgtaaggcggtggcaaagacgccccgtttcgccctgttcaagcacgccatctatgataaaatcggctatcactcatcagactctatctgacgccggcgctgtatccgccggcgccgcgaaaccatcatgaacaagcatttgattctcgacgaacccggcgatgccgactcggcctgcctgtcgcgccacgcagtctggcagcgcaacgatctggctcaggcgcaacaagactggctggcggaagaagtgccggtcgccctggtgtacaacggcatttcccacgtggtgatgatggcgacgccgaaagacctggcggccttcgccatcggtttttcgctgtccgaaggcatcatcgcctcccccgacgatatctacgacattcgtcaacaaccggcctgcaacggcatcgaagtgcatgtggagctctcgagccgccgctttatgcagctgaaagagaagcgccgcagcctggccggccgcaccggctgcggcgtctgcggggtggaacaactgcaggaggtcgctcaacccgtcgcgccgctgcccttcacgcaacgcttcgatttggccctgctcgaccgggcattggcgcagctgcaaggggtgcaaacggtagggaaactgaccggctgcacccatgcggcggcctggatccaaccggacggcgcgctcagcggcggatgtgaagacgtcggccgccacgtggcgctcgacaagctgctgggctaccgcagccaacaggcgtggtggcaaggcgcagcgctggtctcgagccgcgccagctatgaaatggtgcaaaaatccgccatgtgcggcgtcgagatcctgttcgccgtttccgccgccacccgcctggcggtggaggtggccgaacgcagcaacctgacgctggtggggttcagcaagccggggcgcgccaccgtctatacgcatccgcagcggctctggcaatcgacgacgacggcataacgccgccggataagaatcgactattctcaatagcaggacaccaggaagcgccaacgtcatgataattcgcccgaaccagaactggttttttcgcctgttcgcctggcacggttccgtgctgtcaaagatcacctttcgcctgtcgctgaacgtgctgatgtcgatagtggcggtgatcagctaccaatggtacgagcagctcggcgtgcatttaaccatcgcaccgttcagcctgctgggcatcgccatcgccatctttctcggctttcgcaataacgccggctatagccgctttgtcgaagcgcgcaacctgtggggttcgctgctgattaccgagcgctccctgctgcgccagatcaaaagcctgctgccggacgaaccggcggtgcagcaaaaggtcgccaagctgctgatcgctttcagctggagtctgaaacatcagctgcgcgccaccgatccgaccgccgatctgtaccacaatctcagcagcaaggagctggccgaagtgatcgccagcccgatgccgaccaaccgcattctgctgatgctgggtcaggagatcggcaaactgcgccatcagggcctgctgagcgacatcaccttcgagctgctcgacaacaagctgagcgagctgtcccacgccctcggcggctgcgaacggctcgccagcacgccggtgccgttcgcctataccctgatcctgcagcgcaccgtttacctgttctgcagcctgttgccttttgccctggtgaccgatctgcattacatgacaccgtttgtttcggtgttcatttcctataccttcttatcctgggactcactggccgaagagctggaggatccgttcggcgtgtcggccaaccatctgccgttaaacgccatttgcaacaccattgagcgcaacctgctggaaatgaatgaccaaagcccgctgccaccgccgatgaaacccgacgagcactttaatttgatctgagctatttcacccgaacacactggagccgaatgcaatgaatgcaaatacccccctgccgcaagccgtattcacgccggtgacgcgccatgccatctttatcgtcgccaccctgtcgcccgttcccgcccatctggcggcggtgcgcgcctggtgcggcgacatcgccgccgtggtgcgttcggtcggcaaacgcgcgccggcgggtaacctcacctgcgtctgcggcttcggctccgaggcctgggatacgctgttcggcgcgccgcgccctcgccagctgcatccattcagcccgatcggcagcggggaacgcgtcgccgtcgccacgcccggcgacattctgctgcatatccgcgccgatgaaatggatctgtgttttgaactggcctctcagctgatcggcaagctcggcgacgccgtaacggtaatcgaggaggtgcacggcttccgttacttcgatcagcgcgccatgatcggcttcgtcgacggcacggaaaacccggaggggcacgaggccttcgactacacggtgatcggcgacgaagacgcggcgttcagcggcggcagctatgtgctggtgcagaaatacctgcacgacatgcagggctggaactcgctcagcgtggaaacgcaggagaagatcatcggccgccataagcagtccaacatcgagctggatgaagcggtcaaaccgtcgtcgtcgcacagttcgctgaccaccatcaccgacgagcaaggcaacgaggtgaaaattctgcgcgataacatgccgttcggccgccccggcctgcgcgaattcggcacctactttatcggctacgcgcgctctccgcagccgatcgagcagatgctggaaaacatgttcatcggccgcccggccggcaactacgatcggctgctcgatttcagccacgcggtgaccggcactctgttcttcgtgccttccgctccgctgttggaagcgctggccgaccgcagcggcgccgaactgcattaatccgctcgccctacagcagcagcgccagctccatcgccgtgcgctgcagctgcggcagcactcgttcgcgcagctccgccgccgagatctgcgacgcattgacgccaacgttcatcgccgccacaaccccgcctttacgtgaatgcatcggcaccgcaatggaacgcaggccgatctctaactgttgatcgttgatggcatacccctgtctgcgaactctggctaactgttcctgcagctgctccgcactggtgacggtaaactcggtcagcggttcgaaagtgacccgcgacagataatcctccagctctccctcgtccagcgcgctaagcaacaccagccccatcgatgtcgcataggccggcagacggctgccgcgccccagatcgatagtcatgatgcgtttaaccgaggcccgggcgatatacaaaatgttatcgccatccagcgtcgccaccgagcaggattcattaagcaatttgctgagatagtccagcgagttttgcgccgccttcgccagctcggaagaggaaagataagcgtgaccgatagttagcacacgcggcagcaagcgatagtggcgcccatcgggacaatgcacgaatcccagcgctcgtagggtatacaaacaacggcgcaccgctgcgcgcggaatgccggtttgttgactgatctctgacaccgacatctgcgaatactgtggcttgaaggcctgtaacacctccagccctctggccagcgaggccataaaattaggatcgcccttgtactggtcgttgcttaaatcaccgatctcctgcagccgacgcagttcttcggtgccaaattcaggaacttcactcattcaggcctcccattagtatctgctctcaatttacacgctcaatacggcagcaaagccctgcgtatcgcatccgatgccgatttagctgcctgcatcacaaaatgcagacctaaaccctcaatgcaccgataatcgcacaatgttctgatattcgcacttgctgatgcttttttcatcctctaggttaatttcaaacccgctatttgttggcgcaacgtcccaaccgagccttgaggagaactgatgatcgataaaagcatggcgtccgcagacgccgccgtcgcagatattccggatggcgccacccttatggttgggggattcggcccggccgggcaaccctacgcactgttggatgctctgatccgtcaccggccacgcgcgcttacgctgatcagcaacaatgccggcaacggcgattttggtctggcggctctgctgaaagccggctgtgtgcgcaaagtagtgtgttcttttccgcggcaggctgattcttgggtgtttgacgacctctaccgccgtggcgagttggagctggagctggttccgcaaggcaatctggcggcgcgcatccaggccgccggcgccgggctcggcggtttctataccccaaccggctatggcacccaattggcggaagggaaggaaacccgcgagatcgacggccgccgatatgttttcgaactgccgctgaaggccgacttcgcgctgatcaaggcagaacaagccgaccgttggggcaacctccgctatgacaaaaccggacgcaacttcgggccgattatggcgatggccgccaactgcaccatcgtcgaagtcaaccatatggtgccgttgggcgaactggatccggagaacatcatcacgcccggcatcttcgtacaacgcctggtgccctcttctccccgtgcagcacggctttcggcttaaggagcgcatcatgagcaaactgacccatcaacagctggctgagcgcatcgcgcgcgatattcccgaaggcgcctacgtcaatctgggtatcggcattccaacccagatcgccaactatctgccggccgataaagagatcttcctgcacagcgaaaacggcattctcggcatgggcccggcgccaacgccgggcgaagaggacccggaattgatcaatgccggcaaacaaccggttacgttgctgaaaggcggctgctttttccaccacggcgactctttcgccatgatgcgcggcggccatctggatatttgcgtgctgggcgcctatcaggtctccgaacgcggcgatttggcgaactggagcactggcgcaccgggggcgattccggcggtcggcggcgcgatggatctggcgatcggcgcacgtcaggtgtttgtgatgaccgaacacctgaccaaaacgggtgaatgcaaaatcgtccgccaatgcagctatccgttaaccggcatcggctgcatcgaccgcatctacagcgatctggcggtgatggacgtcactccccagggactggtggtgcgtgaaatatttgccggcctgaccccgcaacaactgcaggacgtcaccccggtcgcactgactttcacccttcaacacggggaaccgcgccatgaatccagcttatctgtgtgacgccgtccgcacgcccttcggtcgcctcaatgggagcctggccggcatacgcgccgacgacttggccgctctgccgttgaaagcgctgcaggcacgccatccgacgctcgactggagccaggtggacgacgtgttgttcggctgcgccaatcaggcgggggaagacaaccgcaatgtcgcgcgcatggcgctgctgctcgccggcctgccggtgcaggtgcccggctgcaccatcaatcgcctgtgcggatccagcctggatgcggtagcagctgcggcgcgcgccatcagaaccggcgagagcgagctgatgatcgccggcggcgtggaaagcatgtcgcgggcgccttatgtgatgggcaaggcggaaagcgccttcagccgcacgatgaagattgaagacaccaccatgggctggcgttttatcaacccacagatgcaggcgctgtacggcgtggacacgatgccgcagaccgccgaaaacgtggcatcgcaattcggtatcagccgtcgcgatcaggacgccttcgccctgcgcagccagcaacgcaccgccgccgcgcaggaaagcggcttttacagcgaccaactgatcgaagtgcttatcccgcagaagaaaggcgagccgctgaccttcaaccaggacgaacatccgcgcgccaccaccttagccgcactggaaaaactcaggccggtggtcgccccgcagggcagcattacggccggcaacgcatccggcctgaacgacggcgcctgcgcgctgctgctggccggcgagcgcagcgtggctcgccatggcctgcggccaatggcacgcatcgttgccagcgccgtcaccggcatcgaaccggcgatcatggggtttgccccggcggcggcggtgcgcaaagtgttgcatattgccggcctgaccctcgaacagatggacgtgatcgaactgaacgaagccttcgccgcgcaagcgctggcggtgacccgcgagctgggactgcgcgacgatgcgccgcaggtgaacccgaacggcggcgcgattgcgctcggccatcctttgggcgcctccggtggccggctggtgatgaacgccgcctggcaactgcgaaaaacgcgcgggcgctacgggctgtgcaccatgtgcatcggcgtcggtcagggcattgcgctgattatcgaacgggtatgaggtcaatcatggatattgaatatcgtctcgacggcccggccgacgcaccgctgctggtgctgtccaactcgctgggcaccactttcgagatgtggcaaccgcagttggcggcgctgaccgaacgctttcgcctattgcgttacaaccagcgcggccacggagccaccccgttggcgaaagcgccactgcaactgcagcagttggctgaagacgtcatcaccttgctcgaccatttggatgcgccgaacgcccatttttgcggcatttcgatgggcggattgaccgggctctggctcagtcgttatcaccccgagcgcatcggccggctagtggtcgccaataccgccgcccgcattggcgacgctgaaggctggcgacaacgcgcgcagcaggtacgggaacacgggttggcgccgatcgccgccgcctcccccgcgcgctggttctgcgcggcattcgcgcagcgccaccccgagcaggtggcggcgctggtggcagcgctggcggccggtaatccacagggatacgccgcctgctgcgaggcactggcgcgggccgacctgcgcgccgagattgccttgatgacgcggccgatgcgggtgattgccggtgagcaagatccggtcacgacggtggcggacgccgagtttttagtcgccaatgcgccactcgccgatctgcggcggttgccgacatcgcatatttccaacatcgcctgtccggatctcttcaaccgctgcgttgtcgagtttcttactgaaaaggaatgaagcatggaacttcgcattgaacgcatcgacagctggctggtggatattcccactattcggccacacaaattgtcgatggccacgatgggctgccaaacgctgacgctggtgcgcatgacctgcgccgacggcctgatcggctggggggaagccaccaccatcggcgggctgagctacggcccgcaaagcccggaggggatcaagtcggcgatcgacggctacctcgcgccgctgctgagcggcaaaagcttcagcggtctggcgccgttggttgcgttgatgaatggccaggtccagggcaatacctttgccaagtcggcgctggaaaccgcctttctcgatgcccagggcaaacgcctcggcctgccggtcagcaccctactcggcggcgcgctcagcaacaccctgccggtgctgtggacgttggccagcggcgatacgcagcaagacatcatcgaagggcaacgcctgttggcggaagaccgtcatcgcgccttcaagttgaagatcggcgcccggccgctggaggaagatctgcgccacacccaggctatcaagcaagcgctggggccggagatcagcattcgcgtcgatgttaaccaggcctgggatgccgccaccgccgtacgcggaatggcggcgctgcagcagatcggcatcgatctggtcgaacagccggtgccgcaatgggatcgcacggcgttaatccggctcagtcagcgcttcactctgccgatcctggccgacgaagcggtggccgacgctcacgacggttatgcattggctgcgggcggctttaccggcgcctacgcgctgaagatagccaaggccggcggcccggcgcaggcgctgaaactggcgcaggtcgcacaggccgccggagtcggcgtctatggcggcaccatgctggaaggcacgctgggcaccgtcgcctcgctgcacgcctggtcgacgctgaagctggactggggcagcgagatgttcggcccgctgttgctgaaagacgacgtggtcaccacgccgctgcgtttcgccaacggtcacgtcagtctgccgtcaggcccgggcctgggggtcgatatcgatgaagacaaactgcgcttttatcgacgcaaataactacgagggactacgccatgctattcaaagttgaaatggtcgtgaaattaccgctcgatatgcctaaagcgctcgccgacgaaataaaaacgcgcgaaaaagcatattcgcaaaccctgcaggcgagcggaaaatggcgacatctttggcgcgtagccggtagctacgccaatgtcagcattttcgatgtggaaagcaatgccgagctgcacgagctgttattcgccctgccgctttacccttatatgaaaatccgcgtaacggcgttatgccgacacccgtcatcgatccgcgacgatgacaaataaaataccgggataataacccgcaaggttagctgttaattcctgttctctgtataacctacattataagcaatgaggaattcgcaatgtctatatccttcaatcaacgtcaagacattatcaaattgctggaaatcagcagcggttttactaatgataacggagatccgcgtttcaaaaaaatcatgcatcatctgctgggcgatatttgtcagctcatcgatcgctatgatatttcccctgaggaattctggcaggcgatcaactatctgcacgtcttgggcgaacaccaagaggcggcgctcctggccgccggcttgggactggaacactacctcgatctgcgcgacgacgagcgcgaacgtcaacaagggctgagcggcggtacgccacgcaccatcgaggggccgctgtatgtggccaatgcgccactgagcgccggcttcgcgcggatggacgacggcgacgacgacggcgaggtgatgtggctgcacggacaggtcaaaggtgccgacggcaagccgctggcgggggcggtggtcgatatttggcacgccaacacgttgggcaactactctttcttcgataaatcgcagagcggcttcaacctgcgccggcggataaccaccgacgccgatggccgctacgcggcgcgcagcatcgtgccgtcgggctacggctgcccgcccgatgggcccactcaggctttgcttaatcgactgggccgccacggcaaccgtccggcgcatattcatttcttcgtctccgcaccggcgcataaacacctgacgacgcaaatcaatctcaatggcgaccgttatctgtgggatgacttcgctttcgctacccgcgatgagctgatcgccaacccggtgaaaatcaccgatccggcgctggcggcaaaacgcgatctgcccggcccgcataccgaagtgcagtttgattttacgctttatgccgcggcggaccgcatcgagcagaacagaataaatcgccctcgcgcgctgcaagattaatatttttcgcacaaaagaatagcgacgctaataacgggcaatcggttattgattgcccactgccccgtctatccattttctatgaggccatgaatatgcattcattattgaatccgacaatatctaagctgaaagaaaaaataaatcacgctttaattattgataaagaaaatggcatatatcagtgcaatcgcggtatttttaccgatgaggcgctgtttgaactcgaaatgaaagccattttcgaaggcaattggatttatctggcgcatgaaagccaaatcgccaactcaggcgattattacacgctcaccattgggcgtcagccggtgatgatcacgcgcgacaaagacatgcggctgcatgccatgatcaacagttgctcgcaccgtggcgcgatgttggccagccgcaaggccggcaataaaagtaccttcacctgccccttccacggctggaccttcaataacgccggccacctgctgaaagccaaggacgagaaaaccggcgcttatcctccctgtttcaagcgggacggctcacacgatttgaaacagctgccgcgttttgaatcttatcgcggatttctgttcggcagcctgagcgatgaggtgcaaccgctggaggagtatctgggtgaaacgcgacagatcctcgatctcatcgtcgatcaggctgagagcgggctggaagttctgcgcggctcatcctcctacaccttcgacggcaactggaaactgcagatggagaatggtgcggacggttaccacgtcagcgtggtgcactggaactatgtctccaccatggcgcatcgggatgccgccagcggcatccaaaccatggacgccaactgctggtcatcaaaaaacgacggcggcgcctatggcttcaagaatggtcatctgctgttgtggacccgggtgctgaacccggagtcccgccccatttatcggcacttcacccgtttgaacgatgccttcggcgcacaccgtgccgacctgatggtgaaccaaacccgcaacctgtgcctttaccccaatctgtacatcatggaccagctttccagccagttgcgcgtagtgcgcccgattgccgtcaataaaaccgaagtgaccgtattctgctttgcgccgaagggcgaaaacgccgacgagcgagccttgcgcattcgtcagtatgaggatttcttcaacgtcagcggcatgggtacgccggacgacctggaggaattccgcgcctgccagctggggttcaacgccggcaacatgccctggagcgatctgagccgcggcgctacccgctggctggagggccaggctgacgacaacgccaaagcgctggggatcgtacctgacatgaccggcccccgcccggaagatgaagccctgtatctcagtcagcatcatcattggcaaaacattctgctgcgccagctggagcgccagcaacgaaacgacgaggtggcgcaatgagtacatgtaacctgcaacagcggctggaacaatttctgtaccgcgaagcacgcctgctggatgaccggcagtgggatgactggctggcctgctaccatccgcaggtcgaatattggatgccggcctgggctgacgacgatcgccagacgacggaccctcatagcgagatttcgctgatttattacgccaatcgcgaaggcctggaagatcgcgtttatcgcataaaaaccgaacgctcagccgccagcagcatgccggagccgcgtacggtgcatcttatcagcaacgtggagctgttatcgtccggcgcggaacaggccgaggtgaactaccactgggccaccttctatcaccgctacaaccacacggacacctatttcggctcaacccgactgtggatagatcttagcggggaggcgctgcaaattaagcgcaagaaaattcgtctggataatgactatatcaatcatgtaattgatatttatcatctttaatgcaggaggtgaggtatgtcttttaccgtggcccttaattttgaagacggcgtcagccgctttattcaatgcaacccgaatgaaaaagtactcgacgccgcctaccgacaaaagatcaacctgccgatggactgttcggacggcgtatgcggcacctgtaaatgccactgtgaacaaggagaatatcagctgggcgatgactatctggacgaagcgctgtcagagcaggaagccgcacagcggcgagtgttgacctgtcagatggtgccgctctcggactgcgtcatcgaggtgccgatgccttcgacgatgtgtaaaaccgccagcgaaatgtttaccgccaccgtcgcctccgccaccgccctgtcggacagcgccatcgagttctgcctgacgctggatgatgaacgcggcatcgcgttcctgccgggacaatatgtgaatatcgacgttcccggcagtgcggccagccgcgcctattcgttcagttcgccgcccggcagccggcagctctcttttctgctgcgcaacgtgcccggcggcatgatgagccgttatctgacagaacgggcgagccccggcgacgcgatccgtctgcgcggcccacagggcagtttctatctgcgtgcgccggtgcggccgatgttatttttggccggcggcaccgggctggcgccgttcctttccatgctggaatatctggcgctcggcggcagcgaacagccggtgcatctaatctacggcgtcacccatgaccacgatctggtcaagctggaacagctggaggcgtatcgccagcgtctggcgaatttcagctatctgacctgcgtggccagtgaaacgtcgttttcgacgcataaagggtatgtcacccagcatctcgacgaaagcctgcttaataacggtgacctggatgtgtatctgtgcgggccgccgccgatggtggaagcggtgcttggcgatttccagcgacgcgcctttatcccgaatagcttccattatgagaagttcgcccccagccaggccgatcagaggagttgaccatggataagtcacgtttcagcggccaggtaatggcgataaccggtgccgctcaaggcatcggcaaagcggtggccgaacgcgcggctcgggaaggggcgagtttggcgctgatcgatcgctccccctatctggaggaggtcgtagccgttttacgcgagcgcggcaccgatatcatcgccctgcaggccgatttggagcattgggaagaagcgcgcgatgcgctggatcaggtgcaacagcactttgggcgcgtggatattatggtgaacaatgtgggcggcaccatctgggcgcgaccatttgccgactatgcgccgcaacagattgaggcggagattcggcgttcgctgttcccgacgctatggggttgccgcgccgcgttgccgcatatgctggcgcaagggagcggagtgatcgtcaacgtttcttcggtcgccacgcgcggcgtcaatcgcgttccctactccgcagccaaaggcggcgtcaatgccctgacccagtcactggcctttgaatacgctggagccggcattcgcatcaacgcgacggcgccgggcggcaccgaagcaccgccgcggctgacgccacgcaaccgcgaatccccgacgcagcaggaagaaagttggtatcggcaggtggttgagcagactatcgacagcagtctgatgcaccgctacggcagcgtcgatgaacaagccgccgctattctgttcctcgccagcgccgaagccagttacattaacggaacggtgctgccggtcgccggcggcgatttgggataaaacaggcgcagggccgcagcgatcagcctttggttatcctgcggccctgcgcgtcgatcaccggctcgccgtcctctttgctgaaggcgccgcgctgcggatccggcagaatctccaacaccgcctccgacggacggcacaggcgcgtgccaagcggcgtcaccacgatggggcgattgatcaggatcggctgttgcaccatgaagtcgatcagttgatcgtcgctccaggcaccgtcgtccagccgcagctcggcgtaaggctcgacgtttttacgcaacaacgcgcgcggcgtcatgttcatgtcggccagcaacgcaatcaaccgttcgcggctggggggcgtttccagatacagaatcacctccggctcagcgccgctgttgcggatcagcgccaacgtattgcgcgacgtgccgcaggccgggttgtgataaattttgatgtcgctcatgtcagttgctccggttatggcaaaacggacagccgcagcgccagcgcggccagggtgacgaacagaattggcagcgtcatcaccagtcccacgcggaaataatagccccaggtaatgacgatgtttttccttgccaacacatgcagccacagcaacgtggccaggctgccgatcggggtgattttggggccgagatcgctgccgatgacgttagcgtaaatcatcgcctgcctgatgacgccttccgcgctgctgccgtcgatcgacagcgcccctaccaacaccgtcggcatgttattcatgacggaagagagaaacgcgctcaggaagccggtgccgagcgtcgccgcccacagcccctgccgcgccagcgcatccagcacgccggacagcagatcggtcaagccggcattgcgcagcccatagaccaccagatacatgcccagcgagaaaatcacgatctgccagggcgccccgcgcagcactttgccggtatcgatcgcccgcccgcgtttcgctaccgccagcagcaccagcgcgccgcaggcggcgaccaaactcaccggcacgccgagcggttccagggcgaaaaagccgatcagcaacagcgccaataccgcccaaccggctcgaaacgtcgcgcgatcgcggatcgcttcccgcggtaccggtaaacgcgtcaacgcgtagcccggcggaatatccttgcggaagaacaaatgcaacatcaccagcgtcgccgccacggcgacgaggttgaccggcaccatcaccgccgcatactccgtaaaacccaagtggaagaaatccgccgaaacgatattcaccaggttggacaccaccagcggcaggctggcggtatcggcgataaagcccgccgccatgacgaaagccagcaccgccgcaggacgaaaaccgagcgccgacagcatggcgatcacgatcggcgtgaggattaacgcggcgccgtcattggcgaacagcgccgccaccgccgcgcccaacaggagcatataggtaaacagccagcggcccttgccgttgccccagcgcgcgacgtgcaaggcggcccaggcaaaaaagccgctttcatccagcaacaggctgatgatgatgacggcgataaaggtcgcagtcgcattccagactatctgccataccacggggatgtcgccgacgtgcaccacgccgctcaataatgccaatcccgccccgatcgacgcactccagccaatacccagccccttcggttgccagatgaccaagatcaacgtcagaataaagatcgcccctgccactatcatcgctgtccttccgcccctttaagtttacatattcgatttttcatatgtgtttgcgtaaattttttaccgttacgggcaacctttcgccacgcgttgtgctaactccgtcatctgttctggccggcactgataagcctgctcaataatcgccgccgcccaggccggcatatgcggcgacaggcgataatgtatccatttaccctcgcgccgatcgagcagcagcccgctttcacgcagcatccccagatgccttgaaatcttgggttgcggcagcgccagtgcgcctgacagctcgcacacgcacagttcaccggcgtggcgcaacagcagcaccaaggtcagacgcgtctcgtcagacaggtttttaaacagcttcagcggcgtcaatgacggcatgtcacactcccgttaacctttctcttcaccacaactcgctcgtgaagataccagcttcacatgcgaaaaaacaaatataaaatgcaaaacgttgcccccctcaccgagacatatacttatctttatgccgttcttgcaggaaggaggtaccatgccgctcacattcaaacgttcggaaaggctctccatcggcaccgaaatagagttacagctggtcgatgccgagcactacgatcttacggatcgagccgatcgggtggtcagcgcggtcggcgaccgccggcgcgtcaagcatgagctcaccaaatcgatggtggagctgaacagctcggtgcaccgcgatctcgatgagctgcacaccgagctgcgcgccctgacccataccgtccggcgcagcgcgcagcgcctgggctgtgacgtctgcggcggaggccgccacctgagcaacgactggcgcaagcaggtcatcagcgacaacgcgcgctacaggcagttggccagccgttttggctatctctccaagctggcctgcgtgttcggccaacacattcacctcggcgtcaacgacggggacgaagcgatgtacctgtgccatgcgctgacgccctactttccgcaattgatcgcgctcagcgcctcgtcgccgctgtatcagggggtcgacacttgctttgccagttcccgcttcagcgcccagaactccttccccaactacggatgcctggaacacatctacagctggcatgaattcaacgcctactacgaacggttgaatgccgcaggcgtgattgaaagcgtcaaggatatttactgggatgcgcggccaaaaccggagctgggcacggtagagatccgcatctgcgatacgccgctgcgcctcacccacgccgtgctgctggtcggttactgccgcctgctggccgattttctgttgcagcaccgctcaccgatcgcgccggaatacgatgccttcaccaattacaacaagatcaacgcctatcgcagcggctttgccgccgaatacgtcgatcccgcgacgctgcgccgcagcagcctgaccgcccacatcctgcacactctcgaagcgctgagcggttttgccgagcgacgggaggatcgtgccctgctgcaggccgtcgagcgccatgtccgccagggcatcagcgattcggagcatatccgccagatgttgcacaacggcctgccgcaagctcaggtgatcaagcgcctgtgcgatgagctgttgcagcctgcaagttaagtttcggctatcgattccatacgccaaagccgctgttcattatgtgctctttcgctacaatcgtgagcactgacattcaccgtatcgaggacaccatgtacaacttctcccgctatcaggcaaaagaactggcgctggcttacatgagcggcaaaaaacacgatctgtcgccgcaggaatttttgcagcagctgaaaagcagcgagcgatcgtttgagcatctgctgaaacacggcagcgaaatgccgcgtgacgtgctggttaaaagcttctgaacagccggttgccggccattttccctctacgtcgccggtggcgagcctggcaggcccgcgcattcccggccgttcatcccacgttcctcatcctgcctcgtttcgccctcacaggcgaaaaccccataaattcgcacctagaggcgaattattgacatattcgtatccaggtgcgaatttatagtcatccctccgcaaataatggaacacgccatgccgacgccaatcagcgtaatcagcggcgatctggtcgattcccgccgatcagacaccgtcaactacctcaatgggctgcataacctgctcgatcggctgcggcgtgacgggcggctgcatcaggtggaaatctttcgcggcgatgccttccaggcgcaggccgcgccggaggacgggctgttgctggcggtgtacatacgcctcgcgctgcgggcgatgggcgccgcgcactgggatgcgcgcatcgccgtcgggctgggtagccaacggcccgacgccgccggttacggcagcgcctttatcaactccggcagcgcgctggacgccatggcaaaaaattgccggctggctctgaaaaccgacaacgatcggacaaacgccattgtcagcgatctgctgccgatgttagatcatgtaattggccgcctgtcacaggccgaagcgcgcatcgttcaggcgagaatgttcgccgacagcggcgccgccgtggcggaccagctgcaaaaagccgcctccacggtctccgccgcgctgaaacgcgcggcctatgaggaaatcatgcggtttattcacgccattaacaggatcgtctgaccatggatctgacctatgcgcctttgctggcctggctgttgctcgtccatctgctggcggattttccgctgcagccgctgagttgggtggaagataaaatccaacatcgcgcgcgttcgcgttttctgctgttgcacgcgttgctgcacggggtgctgaccgcctgggtagtggccggtttcggcctgctgcacggcggactgtcttcactgcaggtgctggccagcctgctggccatcgccgtcagccactacctgatcgatttgctgaaagtcaccgcgatgaaccgcctgagcccggcccgcagctttctgctcgatcagggattgcatctggcggtgatcgccttactgtggctggggctgacgccgaatgccggtgaactgctcgcggcgttgggacggcaactggggagttggcaaaccggcctggtgctggtggcctacagcctgatttatctgccgatgagcctgctgattgggcaactgctggcgcgctggacgccgcaaatgccgccttcggccaaggccgacaacgactcgctgctgcgcgcgggcaaacagattggctacctggaaagaacgctgatcctgaccttcgtgctgctggggcaaattccggcgatcggttttttactggcggccaaatctatcttccgtttcggcgatctgcgccaaagtgacgataagatgcgtaccgagtatgtgctgctcggcacgctgttttccttcacgctgaccatcatgctcggcctgctggtcaacaaactgctgtagcggtgcgggggcgaaaaatttcgcccccgaagtgaacgccgaggcggcttacagccactcgccgaagcggcggatatagaaacgcttcatcaactgcgcgaccacgcagtagctgaccagcgttgcggccaaccacgggaagtattcccacggcagcggctgcaggccaaccagggcgccgagcggcgagaacggaatgtagatgccgagcgccatcaccagcccggtggtcagcaacaccggcagcgccgcggtgctctgaatgaacgggatcttctgggtgcgcagcatatgcaccaccaacgtttgcgacagcagcccctcaatgaaccagccggactggaacagcgcctggtgttctacgctgttggcggcgaacacgtaccacatcagcgcataggtcgtaatatcgaagatcgacgaggtcggcccaatccacagcataaagcgcccgatgtttttggaatcccacttgcgcggcttgcgcaggaactctttgtccatcttgtcccacggcagcgacagctgggaaatgtcatacatcagattttgaatcaacaggtggatcgccagcatcggcaggaacgggatgaaggcgctggccaccagcaccgaaaacacgttgccaaagttggagctggcggtcatgttcaggtacttgatgatattgccgaaggtctcgcgccctttgatcaccccctcttccagcaccatcagattcttttccaacaggatgatgtccgccgattccttggcgatgtcggtgccggtgtcgaccgaaatgccgacgtcggcatcgcgcagcgccggcgcatcgttgatgccgtcgccgaggaagccgacggtatggccgttgctctgcaacattttcagcacccgcgatttttgcagcggcgtcagcttggtgaagaccgtgcgttgttccacttcgcgcgccaactcttcgtcatccatctgttcaatctgcagcccggagagcggctcgcccggctccagcccgacatcgcggcaaatcttgcaggtgatcaccgggttgtcgccggtcagcaccttcaccgtcacgccgttttcctgcagtgcggcgatcgcctgctgcgcgctctccttcggcggatcgaggaaagtcagcagcccttgcaccaccatgtcgcgctcgtcggccacgctcagcggttcggccgggcgctgcgcatccagctcgcgcgtcgccagcaccagcacgcggaaaccgtcttcgttatactcgcgggccagcgcctgcagcgccgcacggcgcgcgtcgtccagttccagcgttttgtcgccttcgcgcacgtgggtggcgatctcgagcatctcctctaccgcgcccttacagatcagctgctgcttgccattttcgtccgccaccacgatcgacaaacggcggcgcacgaaatcgaacggcagctcatccaccttgctgaaacggcccagggcttcgatccccggtttgccgcgcccgaaacggatcaccgcctggtccatcaggttcttcatgccgctctgatggaagctgttcagccaggccaggtgcaacacctcgttatccctggcgccagtgacgtcgatgtggtgctcgagaatgatgcgatcctgggtcagggtgccggtcttgtcggtgcagagcacgtccatggcgccgaagttctgaatggcgttcaggcgcttcaccaccaccttgcggcgtgacatggcgatcgcccctttcgccaggttggagctgacgatcatcggcagcatttccggcgtcaggccgaccgccaccgccagtgcgaacagcgccgcctcgctccagtcgcccttggtgaagccgttgatcagcaacaccaccggcaccatcaccagcatgaagcgaatcagcagccagctgacgctgttcaccccgcgatcgaacgcggtttgcgcccgcgaaccgacgatcgacttggccaacgagccgaagtaggtgcgcccgccggtcgccaccaccaccgccgtagcggtaccgctggcgacgttggtgcccatcaggcagatgttggacagctcaagcagcgcgttctcgctggacacttccccttcgctcgacttctgcgccacgttgcccatcgcatcgtatttctcgatcgggatcgcctcgccggtcaaaatcgcctggctgatgaacagatcgcgcgaggcgataagacgcacgtcggccggcaccatgtcaccggcggagagctggatgatatcccccggcaccagttcgcggatcggcacttccagcgtcagcggatgcgcgctgtagctgctgcggcgcagcaccgtggcggtagtgcgcaccatcgatttcagcgcttccgccgctttgttggtgcggtattcctgccagaaacgcagcagcccgctcagcgtgaccatggtcagaatgatgatgacgccggtgagttcagtttcttcaccgctctggagcggcagccaataatcggtaaagaaactgatcgcagccagcaccatcagcacgaagataaacgggttgttaaaggccttgatcaactgaatcaaggcatgcggcgccttgtcgtgggcgacctggttggcgccgaactgctccagccgctcatcggcatcgtcctgggtcaagccgttgcggttgcacttcaggttcgccagcgtttgggcgatgctgttggtcgcctcttgcgcaatggcgtaggtcaccgcgtctttatcacggcgacgcattctttcattaatctgagtcataacgctattctcttattttcgttctgcgcacagggagatcccgcccgataaacaggtgactctgcgcagagtggaattttttaattagcgtgactgaatagcgtgattaccctgtcagccacgcaagaatcatttcccttccggggtcatcgtccataacgcctccttaatgttccgcgttattcaaggcactcatgaataaaaccgaacatataataaagttaatcaatatttgtattattactcagaccggtaattcggacgcgacgcgccaacgcacggcactcacgcttttttccagactgacgcggcaaacaataccctcaatttctttttgcgcggccggcgtagcggtaatttccgcgcacacttccaattgccccgggctggcaatatcggcgctgcgcaaggattgcagccgcaaggcgacgccgttcagcgcctgcagaatcagggtgcgcaccagaatttcatcctgctcgccgcaggtcacctgaatgcgatagcacagttccagatcggtcgcctgctggtgcggctgcaggttgatgcgctgcgcggcctcgcgcagcaggatattggcgcacaggatcaccagcgtggcgaccaccgcatcccaatgctggcccaggccgcacaggacgccgatccccgccgaacaccacagcgtggcggcggtgttgaggccgcgaatgttcagcccttcacgcatgattacgccggcgccgaggaagccgatacccgagacgatctgcgcggccacccggccggcgctggccggatcggtggacatggagctgagaatgaagaccgccgcaccggtcgccaccagcgcattggtgcgcaggccggccatgcgttggcgccactggcgctcggcgccaatcaccgcgcccaggcacatcgccagcaataaattcaaaacgaaaggagtcatagccatgactgtccccttaattaaccgcaggagataaaatcatgtgctgtttagcacacgcgaaatcgcgctgaaaataaatcagcgaatcagcgtgtcatgcctggagggaaaaggctgtggctgcagaataccataataacgtccaactcaattcgcctgaagccacctggcatcaggaaacgttttcttattcgggtatgcacagctcagaaataactggagaggggtgctgcccgccgataacggcaagcaacaaatcagaagagaattggtcagcttgccttatttattttattacaactacaactgtccaattgggtttctccaccgaaattttggctgagtatagtgacgtcgggtaatgaagtaaaggctaatttattaaacgaaaaataaactggaatacccgcaatgatatttcgatgtcacaaatagaagatggcgacattgggcgccgacgccgccttccggccgctgcatcaggccctgtgggacaaagcgctgaccgccaacttcagcgcgcagccattcgccggcgtagcggcccgcagcctgcgcgccaaacgggccgatggccgcacgttcgacgttgcgccttagcaaggtcgccggcggtgggctacgctaggctatatttccgacgacccgcaaggagtggccgatgacgcctctgatccacactctgctcgacgaaatttggcaaagcctggggcagcgccccgcccccgccgaccggctaaccgtaagcggcaccggcgcattgccttcggcttttcccgtaaccgaattggctaccgccgcctggagcgccgccggtttggcctgcgccgagttgcttcgccgcgaggcagccgacgcgccgcaggtctgggtcgatcaacgcctggcctcgctctggttcggctggacgctgcgtccgctggggtggacgctgcctgcggcctgggacgcgctggccggcgactatgcgacgacggatggctggatacgcctgcataccaatgcgccgcaccatcggcgagcggtggagcaggtgctgggttcggcatcggataaaggcacgctggcggaacgcgtgctgggctggaaaaaaagcgagctggaggaagcggtgatcgaagccggcggctgtgcggcccaaatgcgctcggcggccgcgtggcgacaacatattcagggcaaaagcatagcgctcgaaccgctgatccacgcctcgctgcagccggaagcgccaccgccgggctgggcgctacccatcgcccggccgctgcacggcgtacgggtgctggatctgacgcgcattctcgccgggccgatcgccacgcgttttcttgccggtttgggtgccgacgtgctgcgcatcgatccctacggttgggatgagcccggcgttgaacacgaagtcatgctgggcaagcgcagcgcgcgcctcaacctgaccaatgcgcacgatcgccatacgtttgaacatctgctgagaaacaccgacgtgatcgtgcacggctaccgtgccggtgcgctggagaaattgggttatggcgcggaggaaaggcgcgcgctggcgccgggcctgatagacgtctgcctgaatgcctacggttggagcgggccgtggcgcacccggcgcggtttcgacagcctggtacagatgagctgcgggttggcggaggcgggcatggtttggcgtagcgccagtttgccggtgccgttgccggtacaggctctggatcacgccaccggctatttgatggcggcggcggtgctgaccggtatggcgcagcgcctgagccgcggcaccggctaccacgcgcggctgtcgctggcgcgtacggcgcagctgctgctggcgcatccctgttcggcagattatcggccggaaccgctggcgccggccggccccgccgacgagaacccggaaacggaattgacttactgggggggcgcgcaacgcctgcgcgccccgttaagcctgcagggtacgacgctgcaatgggcgctgccggcgaccacgctcggcacctcgcaaccggaatggctgcgccgttaaatcgccgccaactgttgctgcagccactgcagcaagcgggtgaccgccggcgtcagcccggcggtctgcggccacaccagataaacgtcgtcatcgctcaggcgacagggcgcggccaacgccaccagtctcccggcgtcgagggcatcctgcaccagcagctttttcgccagcgcgatgccaaacccttgctccgccgcgcgaatcaacaatccggcatcgttgaacaacgcctgttgccgcccgcacagcgagcgcccttgcgcattgaaccaatcgcgccagggactgacgtcgtgctcgagcaacggaatatcgccaccgttctcgaacgccgccccccattctcgcgccatatccggcgaagcgaccggcagcacgtcacccgacgcgatgcgctgcgcctgcagccccgcccattgaccgctgccgatgcggatcgccacatcgaaccctcgctgcgacagatcctgcagcgccagcgacgcatcgatatccagcgcaatatcggcgcaggcctcatgaaaagcaggcagacgcggcaacagccaataatgggcaaaagacggcaacacgctgatgcgcagcgtctggcttgtcgccgcacgtcgggcgcgggcgacgccctgctgcagcgcctgcagcgccggttccaccgccgccagcatctctttcccggccgcattcaggcgcacgccgcgcccgcgccgttcaaacagcggatagccgaccgcctgctccagcaactgaatttgctggctgaccgcaccgtgcgtcaaatgcacctgctgcgccgtggcgcgcaaattttccaacctggcggcgatcgcaaaggtcggcaagacatgcaggggaatgcgttcattcatcattggttaaccaggctatccaaaaaggttatttttcatcgattttgaccggcaggcaaatgttctatgtttacaccatcatccctgacgctttcggagccgccatgcacccacgtttacaacaagacctcgcacagtttccgcagatcctcgaccacactcgccagttggcggaagattttctgaccgggctgcagcaacgctcggtctgcccaccgcgcgatcaacagcagctgcatccgggagacgatcggctggcggaaaacggcgaaggcgccctggcggcgctggataacttttggcaacgctatcaggccggcatttccgccagcgctggcccgcgttatttcggcttcgtcaccggcggcggcaccccggcggcggtcgcagcggactggctggttagcgtgacagaccaaaatagcttgctcagccatgataccatcgcagccacgatcgagctggcggccgtgacgcagttgaaatccctgctgggcctgccggaaacgttcagcggcagcctggtcagcggcgcgaccatggccaatttcaccgggctggccattggccggcagtggctgggacaacagcacggcgtggatatcgcccaacagggcctggcggcgctgggttccatccgggtattgtcggccaatccacattccagcagcgtgaaggcgctcagcatgctcggtatcggccgcgaggcgctgacgaccgtcgccagcctgccggactcggaagccatggatatggaagcactggaacggcagctcgccgccggcgccggccagccaacgttggtgctggccagcgccggtacggtcaacaccgtcgcgttcgacgatctgccgcgtctgctgacgttgcgggagcgttatccgttttggctgcatgtcgatgcggcatttggcggcgtggcggcatgctcaccgctatacgctccaaggcttgagggttggcagcatgccgattccatcactgtcgacgcacacaagtggctgaacgtgccttatgacagcgcgatccaatttacccgccatttggatctgcaaatgcaggtatttcagaaccattcggcctatctggaagcaccgacattgcggccagacaactatctgcatctgacgccggagaattcgcgccgcttccgcgccctgccgctctggctgacgctgaaagcctatggccgcagcggcatacgggatatcgtcgagcgcaacgtccgattggcgcaggcgctgggggcggcgctggcagccgatgacggtttccagctgctggcgccggtgaatttgaacgtggtctgcttcgcactcagccatccacagggcgacagcgaggcggcgcgcgatcgttttctcgagcgcctgagccggcacggcgtggtgtgctgcacccctacgcgttataacggtcagccggggatccgcgccgcactggtcaactggatgacggaggaacaggacatccggctggcgttggactcgttgcgccattgcctggcggaaacggcctaacgcgcgcggcgtattacccgagttggaaggcctgcaaacgccgttcttgccgcccgtcatcgccgatattatccggcgacagccaggcggcaaacgccgcgcgccgcgccggccattccccgtcgacgatcgacagccagtcggtgtcgcgcgtgcgtcctttgacgacgacggcctggcggaaggtgccttcatagcggaaacccaagcgctcggcggcctggcgtgaaggaagattgaggctatcgcatttccattcgcagcgccggtagccaagatcgtcgaacagatgccgcagcatcaggaaaatcgcctcgctgcccagcgcgctgcgcttcatcagcggcgaccagttgatggtgcccagttcggccacgccgttggcaggatcgatgcgcaaaaaagcgcagcttcccaccgcacgcccgtttgactgatcgatcactaccatcgtgtttctgtcagcgctggacgcctgagcctgaagataacgctggaaatctgcgcgcgactgcggccgctcccaaaacagataagtccagtcgcgatcgtcctcggcggattgataagcctgataaagcgcctccccccagcgctcgaggttaagcggttcgaggcggcaaaaccgcccttgcagtggcgagtgcccgggcatgcctgccggctgccaatgagggagggcttcgcctatcggctgcccatactgattccgtctcaccgcgacatcctgtttttgaaaggtggagaggcaagttaaaaccaacgcgggccagagacaactccgacctgccattcctcccctgcggatcgggcagcaggatgatagtttagagaaatcactcaatcaccgttaaacattcacgaaaattatttcatttaaaataaatatccagataactcattgtaaaacggtgatttatagcaacaaataagctacacattccggccataatgttaactttcgtttgccgttatgataaaaaaagaagtgctaatcattagcatggaaagcatgaaatcaacacaacttaatgatttttaaacaaaaaaataaaataacctcagagagggtattttttaatcactcaaaaaatgcgctgaaagacttcaaaaaaacgacacatgaattttttttaagacttttcctagcaaactaaaattttgtttcgtgacatgatgaacagattcgcggcaagcaatgccggcaggcgcgggcgccaagcgcagatcaggctcaacatgccgaagctggacgagcagcagatcgctctgacttaagccaaacttatagattcatgcaattaataagtttagtatgaaaatatcattgagtgacgccgtgtttattgatagaacactcgctacactgaattattgctccattttgcctttcggctttttaggcttttttcatattaccgcagtaaaacggatttaagtgggggtgcgatatgccaacgattatcatggattcatgcagctataccagattggggttaaccgactatctgacttcgcatggcgtgaagaagcgccatattaatgccatcgaggacattgacagcctgcatgaaaaatgcagcaagttgaatccgagcctggtgtttattaacgaggactgcttcatccacgaagcaaacgccaccgagcgaataaaacgggtgatttcactgcacccggatacgttattcttcatcttcatggccattaccaacgtacatttcgacgattatttatatgttcgcaagaacgtcatcatatcgtcaaaatccatcaaaccagagactatgaatcagctacttagccactatctcgagagaacgtccctccgtacggagaaatcctctctggatcaaacgccggtaacgctgagccagactgaatcaaacatgttacgcatgtggatgtccggtcaaggcaccatccagatatcagaccagatgcaaataaaggccaaaacggtctcttcccacaagggaaacatcaagcggaaaataaaaacgcacaacaagcagatcatttatcacgttgttcgtttgaccgatacattgaccagtggaatattcgtcaatagccgctgaaccacagagaacgcccccgctctgttttaccagccgttaaatacccgatgataatgtcatctggatagcagccgctggaaccacaaaaaaatacctgttgcgttatcccccgctagcgcaacgggtatttttttgccgtcgataaaaaaaatcttaccgcaatgaaataatctcaaaatggacaatttcattagcaaattaatgagattagcctaagttactgcccgtgctcgcgacagggctccacaaacgtgccgtcacggctgtcgatctcattaaaaaaccatacgcccgccgggtagtcgtcaagagaaaccaggtacatggtgccttcgttgaacacttctacggccagaatgacgccttcacgccgcgggccgccgtctgtttttaccgtcactctatcgttaacttgcatacccttctcccttatttacgattgccgtcagtgtattacaaaaccggaggcgatggacaccgctccagccctgccggcctctgctatcagcgtagcagccgcctggattttcactttcttaacggtttggccgcagaatcttaagccggtctcgcgtagcctgtcttcaggcgtttcccccccagagaagcgctcgcaaatgaagaagtaacaaggaacttttgcccgcagacttgcgggcttttttttgcgcgctgccaaattgcaggcataaaaaaacccgccgcagcgggttcttttcaatcagcgggaaacgccaattagatagcggtaacgttagccgcagatggacctttcgcaccgttctcgatagagaactgtacgttctggccttcagccagggtcttgaagccttgatcctggatagcagagaagtgtacgaatacgtctttgctgccgtctgctggggtgatgaaaccaaaacctttagcttcgttgaaccacttcacttgacctttgatcatgttagacatgtctaatttccttcaataataaatgtaagccgccatgggcgaggtagccggtcatcagttacttatggaggcactggaaaggaaattcgtcagagaagggctatccgggataacgctttaaatttgaactactttactcaaaatgtcgtgcataaataggtctgtaccacaggccgacatcattaactcatgagcgagcggcaatagcaacctttttcgccgcgatgggacgctaatctcggctaaacgcacaggatttgaccctgtctgccgatagggccgccgcctggctcgcccgtaacgcccaaggcaaatgatagtaattctcgttctgctgttttatagttgcctgacgaaatcattcagggagattcaccatgccgagatggcttacattaccggctgtcagtgccgccgccctgctggcctttgccgcttacagcgctccgcagagtgcactggagctcaattatcaagcccccgaccccagcatgattcccgcgcccaagccgcctgccccctcagggccggcccccaaaacgggaaaaccgccgattgcctggacagaggcgagagataaaagcggttttcgcgtcgatattgagtgcgatcatcctggctgcagcaaaccgcgcgccaaaccttatcccgcgtatgaaggcccggtgaagaaaaccgatcgccgccgccagtctgatccctattccaccaataaggatcccgattacaacattcagttggggtatgagtggtagtggcgctttcggagtaatgcctatatcagcctcctttgccgctgcatagaatatgcctcagttcaccactcctcctggtgttgaacacaacaagctgtgttgcaaatctttatgcgcctccctataggcgctttttttttgcctatccctcaaagcgtcttccgattacagattgctctcattgccccacaaagtgatgaatgtcacaaatacgcctccttgccattcttattcggaggtaacgttcatggccacaggatcccttgccctcctggccgtcttggccggcattgcgggcttcgccctctacaagcatttaaaatctcagaaaaaaagcacactcgtccgcccgcacgatcggtaaccgacaacgcgctttcaccgcgaaggcccggcacatcgcgcgccgcgccttcgcgggctgtcatgctttcatcacaaaattgtcacattatggccatatgatgattcgcgtttatccgctctggcttaacaccaaggatttcgcccatgaccataattaaagctgcaaaccatcaggaagcagaaaaactcatccgcgccggcaccgccaagaaaatcgaactggcttacgatatcggcagcgacgacttcttccagcttgccagcctgtggtgcgataaaggcgccaaaatctccaaaggaaaagaacacttcatcgtctcgttaaaagggttccgcatcccgcctaacgattaatgccctgccgcccatcgcggcggcttcgcctcttcctcgcaaaaccgctctattcaaccacgcgcgcctcattcgatttcgctaagctaacagcagactttattgcggacgtttcgcctgataaccacgtccgccacgatgaggagagtaaccatgtcaacaaatgcagcgctgcccggcacgatgaaagcgattgaaatcagcgaaccgggcgctcccgacgttctggtcgttaccgaacgcccggtgcccgctccgcaagcgggcgaactgctggtgaaaatcgccgccgccggcgttaaccgccccgacgtgctgcagcgccaggggaactatgcgccgccgccaggcgcctcggatatccccggcctggaaattgccggcgaagtggtggccatcggtgaaggcgtgacccacttcgcgctcggcgatcgggtttgcgcccttatcgccggcggtggctatgcggaatactgcaccgtgcatgaaagcaatgcgttgccggtgccggcggggctgagcctgaccgaggccgccgcgctgccggaaaccttctttaccgtctgggtcaacgtgttccagcgcggtcatctcaaagccggcgaaaccgtgttgatccatggcggcacctccggtatcggcacggtcgccaccatgctggcgaaggccttctgcgcccaggtgatcaccaccgtcggctccgaagagaaacgtcaggccagcctggcgctgggcgccgacgtggcgattaattaccgcagcgaagactttgtcgcacgcaccaaagacgccaccaacggtaaaggcgccgacgtcatcgtcgacctgatcgccggcgattatgtcgccaaaaactatcaggccgcagcgatggaaggccgcatcgtgcaaatcggcacgcaaaacggcgtggtgaaagagctcaatctgatgccgctgctgttgaaacgtctgacccataccgggtcgacgctacgctcgcgcagcgtggcggacaaagcgcagattgccgccgatctgcgcgaaaaggtttggccgctgctggagcgtggcgtgctgaaaccgcaaatttttaaaaccttcccgcttgagcaagccgccgccgcgcatacgctgatggagtccagcgagcacatcggcaagatcatgctgacgttctgagcccattccccgcggccggtgctgcggggaaaccaatgccacgttcagggaatgatgccgcggcggcggaactcatcgaacagtgagaaaaacatgacttcggtttcgacaaactggtggaaaccgaagcgccgcgccttgctgccatccgcgaacatgtcatagtcccaggaaaagacgaaatcggcgaaacgccagccggccaccgcgcgatagtccggttcggccaattggtgccgctgcgccagctcccgccacagcgacgctttgtccgtcatcatgatctccagcgacatcggcagcggcggcgcgcattccagcccaaagtaagcggcgattttcggccacatctcgctccagcgaaacagatcgccgttgttgatattaaacgcctgattggccgccgcaggttcggtcgccgcccacagcgtggcgcgcgccaacagcccggcgtcggtcatttccagcaggctgtggtaagcgcccggtttacccgggaagcgcaacggcagcccgagcgctttgctgatcgacgcgtaaaccgcgatgcttaacgccagattcatcgggttgccgagggagaagccccccaccacgcttggacggatggcgctccaacgccagcgtttgccggcctgccgctgcgccagatactgctgctgcgccacgttaaactccggcggcatatgcccggcatcgctttcgcgcgccggcgttttaaacggccccaaatgcgcgccatacaccttataaccctgcatcaaactgatgtgctccaacgccggcgcgatcggctccagtccttcgacaacgtgttgcaacatctgcaggttcggcgccaccagccccgcccagtccggcgcatcctgataggcggcatagaaaacgtgactaatcgcgctcagcggccgcagcgcgtcgcgcgtcgccgccgcatccagcagatcaacctgaaggtggcgcacccccggcgccgattgtcccccccggcgcgagacgcccaccacttgccagccctgaccggtcagctcctcaatcaatcggcgcccaatcacgccattggcgccgatcaccaatgcctgtcgctttgtatccatcttgccactcctcaggttgtcgataccctgagtgtcattgattagtaatacttgcggtagaagagaccttccactaacacttataagaaaaatctataggcaagatcgacatggataagctgaacgcaatgaaaacctttatgcgggtggcggagctgggcagcctctcggccgccgctcgcgatctgcgtttgacgcagccggcggtcagtcagcaaatcgccggtctggagcagcaactgggggcacaactgctgtttcgcagcacccgggcggtcaccctgaccgatgccggcagcagttattatcagcgcctcaaaccgattctggcggcggtcgatgaagcggaagaagcgctgcacggccagcaccaccagttacagggcaatctgcgcattcatgccccgaccgggttcgggcagttgcacgtcacgccgctggccatcgctttccagcaacgtcatccgaacctcgccatcgagctgctgctggacgatcgtcgcgccgacgtgatcggcgaaggcatcgacatggcgctgcgtttcggtgaactgcatgcgcccggcatggtggctaaacgtttgggcgagctgcaacgcctgctggtggcgtcaccggcctacctggccaagtatggcgctccacgttcgccggcggagctggctaaacatgcgcacattcgttacagcggtttgaacgacggcgatacgctcactctgttcgggccgcacggccccgagatggtcgctctgcggcccacgttccgcgccaacaatacgctatcgctgctggccgccattgaggctggagccggtatcggcggcgcccaacggcctttaatcgcccagcagctggcgacgggggcgctggtgcccgttttgccggaataccgctacccgcccatggcgctgcacgcggtctatcccgctttacgttttattccggagaaagtgcgcccctgggtggcacatctgcagcaggcgttgacggcgatcgagggaattagcggagtgaatgctcccggccagacgccgggagcctaatcattatttgaacagtttaccgaccatatcgcccagctcgttgctgtcttgctgcacttcaccgtttggtgaggcggcatccgcgaccgttggcaagaactgtgcaatggtgctggacgcctgtgcaggatcgatgcccagcttttcagccagttggttgatggcgtcgctacccaacgcctgctgcacatggtcgccggtaatcggctgattttcgccattgccgagccaggaaccgacgatatcgccgaactgcccctgacggaacttgtccaaaatggcctgcaggccgccttgttgctcgacccactgcataatggcgatgtagtcgatacctttaccaccgttggcgccgccgcccagaatgttacccaatacgctatcgaacagacccatgatattcccctttcagcgggtacggcccgcgccgcaccgccggattgatttcacgaaaaagggccgccgcggcgaccctgttgagcaacggctgcttagcctttgatcttcctgtagacaaaaagcaccaccagggcaccgatgaccgccaccacaaagctgcccaggttaaaaccgtcaacgcggcccataccgaagaaggtgctgatatagccgccgacgacggcgcccacgatccccaatataacggtcacaataaagccgccgccgtctttgcccggcataatccacttggccaggataccggcgattaaaccaaaaatgatccaggaaatgatgcccatctttactctccctattaccttttgcctaacagaaatcctattaccaggcccacgacggcgccggcgcctatccccgcccaagggttatccttgaggcaggcacatgattgctcgagcgctgcttttacaccgctgctcacttcgcaggcggtggttttcacgtagtcgctcggttgctcaacaccgtttagatcgtcattttcatatgacatgtcaaatccttacagaccaaccctctgagaatttcgtcacatgtttcgcgccaggcgccgtccgctccgcgatcttgctctgggcaatctgcccgctgccgctcaatgcggaggcttccggcggcaaacgcacaacttcacactatgactatagtaaaaaatcagcggtttacctatttccgtccgtctgaatttcaccatacaaaaaacgatctgatttcatcccgctgtcatcttgcaaggctaaactttaaacatatcctccgggaggaaacgccgatgttcaatgcaccttttgtcctgatcctcgcgctactgtacgcactggccgccgcttgggacggttccgtagcgttactgtttcattaaggttacatagccgttgtcacttttgcgatgcgcttaattgtgtctttatttttcaatttcgccagccgattgaaatagcggaaaacatcccctcctccctcggtaaaaatcctatttcgcttcgtttttcgcctgcgtttaaataaagcgtaaaaaaagcattaatggaaaattctgtttagcacaaaatattctatcatcttcctcatgacaatttgggttaaggtcccattggcaaagaaaaggaatgacaggaaaaatgctttataaccaacactttgagcgcgaattcttgcgccctcgttattggttgttgtggataggactgggaatactctatctcttggtattactgccctacccgctcatttatcggctcggacacggccttggcagaatagccatgcgcctaatgaaacgccgggtaaaaatagcgcgccgcaatttagaactctgtttccccgcaatgcccgccgccgagcgcgaggcgctgatcgtcaaaaattttgagtccgtcggcatgggcctgttcgaagtcggcatggcctggttctggcccgactggcgcatcgcccgctggttcaaggtgagcggcatggaaaacatgcggctggcgcgtcaggacggcaaaggcgttctgctgatcggtctgcatttcctgacgctggaactgggcgcacgcattttcggcatgcaaaaccccggcatcggtgtgcatcgcccgcacaacaacaagctgatggaatgggtacagacccgcggccggctgcgctcgaataaattcatgatcgatcgtaaagatatcaaaggcatgatccgcaacctgaaacagggcgaaatcctgtggtacgcgccggatcacgattatgggccgcaaagtagcgtattcacaccgttcttcgccgtggaaaatgccgccacgaccaccggcacctttatcctggcgcgcatggggcggccgtcgatcgtgcctttcgtgccgcgccgcctgccaaatgctcagggctatgagctgatcgtgcagccgccgttgacggacttcccgctggatgatgaaacgcgcgcggcggccaagatgaaccgcgtggtggaagaacaagtgctgctggcccccgaccaatacatgtggctgcaccgccgctttaaaacccgcccacccggcgaaccgtcgctgtattgacccccacgcgcctttgcccgtcacaccgccggcgaaggcgtgctcaccttgcacaagcattctgcgccaggggaactacactagtaagtcaccgacggcaattattgccgccagcaatcatttcgtccgcccgagagccggtcgttgcctgtcgggccataatcgaggtcaatgtcatgctggtacaaccctatctgtttttcagcggtaactgtgagcaagcgattaacttctacgtacagcagttgaatgccaaagttgaaatggtcatgcgctttaaagacatgcccgaagaagcccggcaaggcggaccgcaggacgtcaatccggaagcgatcatgcatgcgcgcctgctgatcggcgaaggcgtgctgatggcctccgacggctgtccgcaggatgacagcggcggtgcttctcacaaaggtttctcgctgtcgctgaaccccagcgatgcggaacaaggacgcaaactgttcgacaatctggcacagggcggccaggtgacgatgccttaccaagccaccttctgggccaaaggttttggcatgctgaccgacaaattcggcgtcaactggatgatcaacgtcgaataaccccgcatggcgccgctagccatagcggtgccagtcatacgccgccttggcgaacagcacgaacagcagcgccaacagcaccaatcccaaccgccaatagggcgaccggcggcggcgccaggcgaagtacatcatcaccgccagcgttcccagcgtaagggggtaatacaccgccagcgtcagtaaagcgataatgatgtaatcagacatggctctttcactccgaggtgttcacaccgccgctgatgcgggcagcgatcgacctttcgccttatcgcctcgttaaaggctagaggtctggcgcatttatgcataaaatataagattgctcttaactcaaactgaatagtaatcaaacaacaagggtgacatgactcagcagcaacccatacaggatgccgtgccggcgcgcagcgttaaaagctccccattattatttcaggccggcgtgtttgtcatcatcgttgccgccacgctgatcctctttaacagctggcaaatctggaacgcacaccagcgcgatctgcgcagcgccgagcatgaatccgccaacctcgcccgctcgctggcacagcatgccgacgatactttcatgcaggtggacggcaatctgctcgatctgaccgaacgtctccagaacgacggactggggccatcgcaattgacccggctgcagcgggtgatgcaaacccaggtcggcaacctgccgcagctgcatgggctgtttctctacgatgcgcgcggccgctggctggcgacctcctcgggcaagttcatcaagaacgccaacaacgccgatcgcgagtacttcatataccatcaaaaccgcgacgacggcggcctgtacatcggcaaggtgatccgcagccgcaccaccggcgatctgatcattcccgtttcgcggcgtttcaacaacccggacggcagctttggcggcgtggtgctggcgacgctgtacatcgattatttccgccagttttacgatagcttcgccctcaacaccgacgcctcactgaacctgctgctggcggacggcaccatcctttaccgccgcccttactcggcggcgtcgatcggtaaaaacatcgccaagggtgtgctgttcagcgaaattttgccgcattcggaattcggtaacgccaccatcacctcgctgtacgacaaagtggagcgcatctacggctattcgcgggtcaaccgctttccgctggtgatcgccgccgggctgtcgaaacgcgacgcgttggcggactggcgcaccgacgccggcctgttcgccgtcggcggcctctcgctgctgatgatcctgttggcgatgggcatggtgctgctgcggcaaatcaagcacagcatgcaaaccgaagccgagctgatgcgcacccgcgatcagctgaccagcatcaaccagatgctcgaagagttggcgctgctggacggcctgaccgggctggccaaccgccgccagtttgatatcgcgctgaagaacgagctggcacgggcttcgcgcaactaccgcagcgtggcgctgctgatgctggatatcgactatttcaaacagtacaacgacagctatggccacgtcgccggtgaccaatgcctgcagcagatcggccaaacgctcaaagggttggcgtgccgcagcaacgacgttctggcgcgttacggtggcgaagagatgggaattatcctgccggataccgacgtccagggcgcactgattttcgccgaacgcgtcatcaacgcggtgcgcgatctgaaaattccgcatcagggtaatccgcacggcatcgtcaccatcagcatcggtatctgcgccaaagtaccgcatatgtataacgatacgccgatcagctttatcaatgaggcggacagtgcgttgtatcaggccaagaaaaaaggcaaaaattgcatttacggcgcttaatcatcaatcgggccaccaaattttggcggcccgatttattaccaaccaaaatgaaataattcctctccgcaacattattttcccgggttaccctgcgctctgaataaaataacgccaataataagcataatatttatttccattaaaattcaacaagataaaaaatcgcccttccacagacaattcgtgccatttttgattattcgtgcctacgcgcagccccgtttagccctcgtttacttttcattggtattgccggtgatatccttatcaggactattctctatatcaggaagccatcgcacgcttcggcgcactgcgccctgctgatacatccataatagaacccacaaatttcacgttgcaattgagcggcctgttgacgccgctccagccagccactgcgcaagccagtgcagccaatcacgcggcaacctgaaagacgggaataaagcgatatagatttgcgaggagatctcatgcctactggcgatattatgcgtgaacaggccgtcctgacgctgccgttgcgacaatgggcggcagcggaagcatccagcgcggtcagcgaactggaacagggcaaggtactgtttctgcccgaactggccttccccctgtctgaacaggaaatgccgctgctggatccgacgttggtcgatccgaagcgcaaaaacatcagctatcagccgctgtccggcaaactgagcggcgtcgccgttgcggaacgccggcaacaggttcagcaactgctggagcgctattatcaatcttgccgccagctgatcgccgggctgttgcccgagtatcaggaggcgctgcaccacccgaccggcagcctgcgtttgcacccggtttccgcctggcgggcgaccagttcctggcgcaaagacgacagccgcctgcacgttgacgctttcccgtcgcgcccgaactacggcgaacgcattctgcgcattttcaccaacatcaacccgcacggcgagcatcgccaatggcgcgtcggcgagccgttccctgagctggcggcacgctttatgccgcgcctcgcacgctactccgccctcagcagctggctgcagcatcaggtgcgcatcaccaagacccgccgcagccattatgaccacctgatgctgcagttgcatgacgccatgaaggccgacggcgattatcagcaacggggtccgcagctggcgctggaattcccaccgggcagcagctggatttgcttctcggatcaaacgccgcacgccgcaatgggcggccagtttatgctggaacagaccttcctgttgccggtgaacaagatgcaggatccgcagcgttcgccgctgaaagtgctggaacagctgcgcgggcagccgctgatctgaatggctcgccgccgccgggatgccggcggcggcgaaacgcgcattatgcctcgaagtccccttgctggcgcgccaccagcgtcagaatgctgtagagcgccaccggttgctgttcctgattcaacacctgaacatcccacaccaccacgccgtgcggccgatcttcggcggttttttgcggcttgcggattttctttttgcaggtcagccgcacctgaatggtgtcgccgatcttcactggttcgataaagcgcagattctccatgccatagttggcgatcaccggcccgacggcggcgtcgacaaacagcccggccgcagcggacaccacaaagtaaccgtgcgccacccgctcgccgaacagcgaatcggcggcgccgatcttgtccatgtgcgcgtaaaaatggtcgccgctcaggcaggcgaagttgacgatatccgcttcggtcacggtgcggcgcgcggtcaacaggctgtcgcccagctgcagctgctcgaagtatttgcggaacgggtgcaccggatgttcggcgaccggcgcaccgcgcacccattcgccgccgatggccgccagcatcgccgggctgccctggatcgccgtgcgctgcatatagtgcttcaccgcgcgcagtccacccagctcttcaccgccgccggcgcgccccgggccgccgtgcaccagcatcggcaacggcgagccgtggccggtggattccgccgccgcctgctcatccaaaatcagcatacgtccgtgagcgcaggccgccgcgcggataaagcgcttggccactgccggatcggcggtcaccagcgatcccgccaggctgccctgccccagcaacgccaacgcgatcgcctgctcggtatccgcatacggcatcagcgtcgccaccgggccgaaggcctcagtgccgtgcaccgcctgatgggtgaacggatcggcgcaatacagcagggtcggcggataaaacgccccaccgcgcgcgccgtcgcccatcacttccagcttatccaacgacgcgccgcacagcggttcgcagccgttgcgcagcaggaactccaccttgctttgcacatcatcacgctgctcgtggctgaccagcgcccccatgcgcacctgctccagctgcgggtcgcccaccgtcacccccgccagacgctgcaacaaggcctgacgcaccgccgccacctgcgccgccggcacgatgatgcggcggatcgcggtgcacttctgccccgccttggcggtcatttcacggcacacctctttgataaacagcgcaaattccggcatctccggcgtcacgtcttccgccagcacgcagcagttgagcgaatccgcctccattgtgaacgcgatcgatttttccaacaggcgcggatgcgcccgcagccgctggccggtctgcgccgaaccggtgaacgttaccgcatcctgataatccaggtgcgcaaacatgtcgccgacgccgccgcataccaactgcagcgcgccttccggcaccagcccgctgtcgacgatcagcctgaccatcgcctgcgtcagctgcgcggtggcggtggccggcttgatgatggccggcatgcccgccagccaggtcggcgccagtttttccagcatgccccagcaagggaagttgaaggcgttgatatgcagcgccacgccggggcgcgaggtcaatacgtggcgggcggcgaactgcgcctgcttcgacagcgggatcagctcatcttccggccacagcgtatcgtccggcagatcgcggccggccatgccggcataggcgaacagcgtggcgatgccgccttcgatatcgacccagccgtcgctgcgcgtcgccccggtttgataggaaatctgatacagcgcctctttatgcgccagcaggtgtttcgccaccgctttcagcatctgggcgcgctgctggaatgtcatgtgcgccagcgccgggccgccgtggctgcgggcatagctcaggctggccgctaacggcaggccgtcggagcaaacctggtacagcgcttcgccggttacggcgtgacggatctcgcgcgcctctccctgcccgtacacccaggcgccagaaagataactgtgtaactgctgcatgtgccctccggaattcataaattttcaccatacagcttaattacgtatcacataaatgccagtcgacgccaaactgaattttaacaaaaacagaacaagaagcgctttcaagccgtttaccctggcattaatacggagtcactttttatatttataaaataaaatcaaatgattaacaaaaacatttgtgagtgcgctcgcaaaaccacataaatctcgtttgatctttttgttatcaatttgtagccttatggttagttaaagtgattcacatttttatatttaatgtgaaaaatacgaatcaccaagaggcaagcatgacaactgacgcacagtatcagcagcatttcgacgacaagatcgcggcggatatcgccattgaggctaaagactggatgccggacgcctatcgtcagaacctgattcggcagatcggccaacacgcccactcggaagtcatcggcatgctgccggaagccaactggctgacgcgtgcccccacgctgcgccgcaaggcggtgctgctggccaaagtgcaggatgaggccggccacggtctgtacctctacagcgccgccgagaccctcggctgttcgcgccaggacatctaccaaaagatgctcgacggcaagatgaaatactcctctatcttcaattaccccacgctcaactgggcggatatcggcgtgatcggctggctggtcgacggcgccgccatcgtcaaccaggtggcgctgtgccgcgcgtcctacggcccctatgcgcgggcgatggtgaagatctgcaaagaggagagcttccaccagcgccagggctacgaggcggtgatggcgatggccaacggcagcgacacgcagcgcgccatgctgcaggacgccattgatcgcttctggtggccggtgctgatgatgttcggcccgagcgacgccgactccccccacagcgcccagagcatggcgtggaaaatcaaacgccacagcaacgatgagctgcggcagaagttcgtcgacaacaccgtaccgcagctggaagcgctgggcatgacggcgccggatccggatctgcactgggatgccgctgccggccactatcgcttcggcgagatcgactggagcgaactgcatgaggtgatcaaaggacgcggccagtgcaaccacgaacgcctgcaggccaagcgccgcgcctgggaagacggcgcctgggtgcgcgacggcgccatggcccacgccgcgaaaaacgccgcctccgccgcatagccaacataaggaaccgagatcatgagccacgttgaatggccgctgtatgaagtgtttatccgcagcaaacaagggttggcgcatcgccacgtcggcagcctgcacgccgccgacgaccaaatggcgctggaaaacgcccgcgacgcctacacgcgccgtaatgaaggctgctcgatttgggtggtgcagtcgcgccatctgatcgcctcgcagccggaagatcgcggcgcgttcttcgatccttccgaagacaagatctaccgtcatccgacgttttacaccattcccgacggcatcaagaacatgtagaggcgaccatgacggttaacgatccgcgcatcagctatttgcttcgccagggcgacacgcctctgatcctcgcccagcgcctgtgcgcctggtgcggccacgcgcccgagctggagatcgatctggcgttggccaacatcgggctcgatctgctcggccaggcgcgcaacttcctgggctacgccgccgaactggccgggccgccctgcagcgaagacagcctggccttcgggcgcgacgaacgccagtttcataacctgctgctggcggaacagccgaacggcggtttcaacgacacgttggtgcgccagttcctgctcgacgtctaccacgtgcagctgcaccaggcgttgagccgcagcggcgatgcgcagatcgccgccatcgctgccaagtcgttgaaggaggccgattaccacctgcgcttcagccgcggctggatgatccgcctcggcgacggcaacgacatcagccaccgcaagatccagcagtcgctggataacctgtggcgcttcaccgccgagctgttccacgccgacgcgctggagcttgagctggcggaacagggcatcgccgtcgatccgcgcgagctgcaggctccctggcaagcgcaggtggaagagacactgcgccaggcgacattgacgctgcccgccgagcaggcgttccgtcacggcggcaaacaaggccgacacagtgaacacctcggcccgctgctggcggagatgcagttcctgcaacgcgcctatccaaacggccaatggtaggaggccgcgatgaacgtcactcgtttgcaacccgctgaaatcccgcagatttggcactgtctgcaacagatcagcgatcccgagctgccggtgctgtcgatcaccgatttgggcatggtgcgcgacgtggcgcgcgacggcaacggctggcgcgtgaccttcacccccacctactccggctgcccggccaccgaatttctgctcaacgccatcgagcagcggctgacggccgccggcttcagcccggtgcaggtggacattcgcctcagcccggcctggaccaccgattggatgaacgccgacgcccgcgagcggctgcggcaatacggcgtagcgcccccgcagggccacacctgcgatcggccgcacgcccacggcccggtcgcctgcccgcgctgcggcagcacccacagcgagaagatcagcgagttcggctccaccgcctgtaaagcgctgtaccgctgctgcgactgccgggaaccgttcgactacttcaaatgcatataggagcgctgacaccatgacggtctttcatcgcctgaacgtcgccgccatcgagcgcgaaacgccggacgccgtagccatcaccctgcgggtacccgaagagctgcaaaaccaataccgctacacccccggccagcacctgacgctcaaggcgctagtcaacggcgaagagctgcggcgttgctattccatctgcagttcgccgcaggaaggcctgctgcagatcggcgtaaaagcgattgatcagggccgtttctccggctttgtcaaccgcatgctgaaagtcggcgatgcgctggaagtgatggtgccgcaggggcgcttcggctatcagccgcaggcggagcgccgcggcaactatctggcgatcgccgccggctccggcatcacgccgatgctgtcgatcatcaaggcgacgctgcagctcgaaccgggcagcagcttcaccctgatctacggcaaccgcaacagccgttcaatgatgttcaaagaggcgctgtcggatctgaaaaaccgctatccgcagcgttttcagccgctgtacctattcagccaggagagcctcgacagcccgctgctcagcggccgcatcgaccgtgaacgcctggcggcgatcggcggcgcgctgctggatttccgcgactatgaccacgccttcatctgcgggccggaatcgatgatggacgacgcgcagaccgtgctggaacaggccggcgtaccggccaaccacatccacagcgaacgtttcaacaccagcggcctggtcgcccgcccgcgccacagcggcgatcgcaatgccacccgggtggcgatcctgctcgacggccgccgattggatatcgaggtcggcgaacaggacgacagcattctcgatgccgcgctgcgccagggcgccgatctgccctacgcctgcaaaggcggcgtgtgcgccacctgcaaatgccggctgaaggccggccaggtggagatgggcgtcaactacagcctggagccggatcagctggcggcgggctacgtattgagctgccagtcgtggccgaaaggcgacggcgtggtgttggacttcgacgtctaggagccgcgatggataccccctttattttgcatcagcagcaacaccgcgtggtcacgctgacgctgcatcgcccggaggcgcgcaacgccctgagcacgccgtgcctggaacagctggttacccggctggagcaggctgacgccgacagcggcgtgggcgccgtggtgatcgccggcgcggcgcgcttcttcgccgccggggccgatctgcgcgaactgcaacaacaggatctgccggccgcgctggcggacagccgtccgcagctgtggcagcggctggcgcagttcagcaagccgctgctggcggcggtgaacggctatgccctgggcgccggctgcgagttggcgctggcctgcgacatcgttatcggcggcgaaagcgcccgcttcggcctgccggagatcaccctcggcctgatgccgggggccggaggcacccagcgcctgatccgctgcgtcggcaagtcgcgcgccagccagatggtgctgaccggcgaagccatcgacgcccgcaccgcgctgcactctggccttatcagcgaagtgtgcgtcgatgccctgacgctggagcgcacgcagcagattgccgatcgcatcagccgtcaggcgccgctggcgctgcgcgccgccaaacaggcgctgaaacaggccgaggagatcggccttagccaggggctggcgatggagcgtcagcaatttgtcaccctggccgccaccgacgatcgccgcgaaggcatcgccgcctttttcgaaaaacgtacgccaaactatcaggggcgctgatttatggataacgcattgattctcagccatctcgacgccggcgtgttgacgctgaccctcaaccggccggatcggctcaacagctttaatgacgagatgcatcgccagttgagtgaagcgctgacgcaggccgagcgcgacgacagcgtgcgctgcctgctgatcgccggcgccggccgcggtttctgcgccgggcaggatctcaacgatcgcaacgtcagcgccgatcaacaggcgccggatctcggcctgtcggtcgaacgtttctacaaccccctgatccgccgcctgaccgccctgccgaaaccggtggtatgcgcggtcaacggcgtggcggccggcgccggcgccgcgttggccctggcgtgcgacatcgtcatcgccgccgacaacgccggctttattcagtcgttctgccgcctggggctggtgccggattccggcggcagctggttcctgccgcggctggccggccacgcccgcgccatgggcatggccttgctgggtgacaaaatcagcgcccaacaggcgctggagtggggcatgatctggcaggtggtgccggcggatgaattggccgaccgcacgcaaacgctggcgcgccatctggccacccagccgacttacggtctgggtcttatcaagaaagccatctacagctcggccaccaacagcctcgatcagcagctcgatctggagcgcgatctgcagcgattgggcggccgcagcgacgactaccgcgaaggcgtcagcgcgttcttcgccaaacgcacgccaaacttcagcgggaaatagccatgaacgcgccccttcttaacggccaggtggcggtgatcggcgccggcaccatgggcatcggcattgcgcaggtggccgccgccgccggtcacccggtgcggctgttcgatatcgcgcccgccgccgcccagcgcgcgatcgatgaactcactcgccgcctgcgccagcgggtcgacggcggcaaggccgacgccaacgccaccgaggcgctgctggcacgcctcgaacgcgccgattcgctcgagcaactggccaacagcgcgctggtaattgaagcggtggcggaaaatctggcgattaagcagagcctgttccgcgatctggaagcggtctgctcgcccacggcgctgttcgccagcaatacctcctcgctgtcgatcaccgccatcgccggcgccttgcaacacccggcgcgcatggccgggctgcacttcttcaatccggcgccgctgatgaagctggtggagatcgtcagcggtctggagaccggggccgagaccctcgcggcgctgcaggccctggcgcagcgctggggtaagcaaagcgtcgtgtgccgttcaacgccgggattcatcgtcaaccgcgtggcgcggccgttctacgccgaaaccctgcgcgcgctggaagaacgggtggccgacgccgccaccctggatgcagtcatgcgcgacgccggcggcttcgccatgggcccgctgcagttgaccgatctgatcggccaggacgtcaattacgccgtgaccgactcggtgtatcaggccttctaccaggatccgcgcttcaccccctctctggtgcagcaggaattggtggccgccggacatctcggccgcaaatccggccgcggcttctaccgctacgacgcgcaacgccccgccgcagagatgatcgcctttgcgccgccggcgcaggccgcgccgccgcaacgcgtcacgctgcacggcgactggtcttctctggccgatttagcggaactgttgatcgaaaatgcgggggcgatcaaacaacctggccagaccagcccgtacctcacgatcgacgacgttacactgatgttaaccaatggtaaaaccgccggccaactggccgacgaacgtggaacgcctgtggtgctgttcgatctctgtgccgactatgcgcatgcctccgccatcgccatcagctgcgcggcgcaaaacggcgcgcaacacaatgccaacgtgattcgcctgctgcagtccctcggcaagcaggtcattcaactgccggattatcccggcctgctgacgatgcgcaccctggccatgctggccaacgaagcgctcgacgtggtgaacaaaggcgtcgccggcgccgaagataccgatctggcgatgctgcgcggcgtcaactatccgcgcggcccgctggcctggggcgccgcactcggctggcgtcacattctgacgacgctggaaaacctgcaacgctattacggcgaagcgcgctatcgcccgatgccgctgctgcgccgctacgcttcccccgcctctttcccaggagccgaacgatgaacgccaatacgccgcgcgcgctggctcagcgctgcgccgaacagatgttccagcaagatacctgcgctcaggcgatggggatgcacatcgacgccgtcgacgccgggtacgcgcaggtcagcatgaccgtcggcccgcagatgctcaacggccaccaaacctgccacggcggccaactgttcagcctggcggacaccgccttcgcctacgcctgcaacagccaggggttggcggcggtagcctccggctgcagcatcgacttcgtccgcccggcgctggccggcgatcgcctcaccgccagcgcgcagatgcgccatcagggcaaagccaccgggctgtatgacgtcgaaatcgtcaatcaacagggcaaaaccgtcgcctggtttcgcggccgcgcgcaccgccttggccacagcattttaggagatcaggcatgaatcaggcatttatctgcgacggcgtgcgcaccccgatcggccgctacggcggcgcgctggcgcaggtgcgcgctgacgacctcgccgccctgccgctgcgcgtactgctggagcgccatccgcaggtggattgggcacagctggacgacgtgatcctcggctgcgccaaccaggccggggaagacaaccgcaatctggcgcgcatggcgctgctgctggccggattgccggtcggcgtttccggcaccacggtgaaccgcctgtgcggttcgggcctggatgcgttggcaatggcggcgcgcagcatcaaagccggcgacgccgggctgctgctggccggcggcgcggagtcgatgacccgcgcgccgctggtgatgggcaaggccgacagcgccttcagccgccaggcgcagctgtacgacaccaccctcggctggcgcttcgtcaacccgcgcatgcaggccgagttcggcaccgattcgatgccggagaccgccgaaaacgtcgcggcgcagttcaatatcagccgcgccgatcaggacgcctttgcgctgcgcagccagcagcgcgccgcccgggcgcaggcgctgggccacctggcgcaggagatagccccggtcagcctcaccggtaaaaaaggcgtggtcaccctgttcagccaggatgaacacccgcgcgccgacaccaccttcgagcagctgcaggcgctgaaaaccccattccgtcagcccggcagcgtcaccgccggcaacgcctcgggcctgaacgacggcgcggcggcgctgatcgtcgcctccgaagcaatggcggtgcgccaggggctgacgccgcgcgcgcgcatcgttgccaccgccacctgcggcgtggagccgcagctgatgggcatcggcccgctgccggccacccgcaaggtgctggagatcgccgggctgagcctggcgcagatggacgtcatcgaactgaacgaagcgttcgccgcccaggcgttggcggtgatgcgccagcttggcctgccggacgatgccccgcaggttaaccccaacggcggcgcgatcgctctggggcacccactgggcatgagcggcgcgcgcctggcgctggccgccctgtttgaactggaacggcgagccggccgctacgcgctttgcaccatgtgcatcggcgtcggccaaggcatcgccatgatcattgagcgtgtctgacccctgaggctaaccatgacaataaatccacagcccctcgaaacgatcgaattcgcctcgcgcgatgagattgaagcgttgcagttggcgcgtttgaagtggacgctgcaccacgcctacaacaatgtgccgatgtacaagcgcaagttcgatcaggcgggcgtacaccccgacgatcttaagcagctgagcgatctggcgcgcttcccctacaccaccaagcaggatctgcgcgacaactacccgttcgacaccttcgcggtgccaatggagcaggtggtgcgcatccacgcctcctcgggcaccaccggccgcccgacggtggtgggctacacccagcgcgacatcgataactgggccgatatcgtcgcccgctgcctgcgcgccggcggcgccaccgccaaagacaaggtgcacgtcgcctacggctacggcctgttcaccggcggcctgggggcgcactacggcgcggagcggctcggcgcgacggtgatcccgatgtccggcgggcagacggaacgccaggcgcagctgatcctcgacttcaaacccgacatcatcatggtgacgccgtcctattgcctgacgctgatcgacgaactggagcgcaagatgggcggcgacgcgcgcggctgttcgctgcggctcggcgtgttcggcgccgaaccctggaccgaagccctgcgccacgaaatcgaatcccgcatgggcatcaaggcgctggatatctatggcctgtcggaagtgatggggccgggcgtggcgatggagtgtctggaaagcggcggcggccccaccatctgggaagaccacttcctgccggagatcatctgcccggagaccggcgtcgccctgccggacggcgagcacggcgaactggtgtttaccaccctgaccaaagaggcgctgccggtgatccgctaccgcactcgcgatctcacccggctgctgccgggcgacgcgcgccagatgcgccgcatgggcaagatcaccggccgctccgacgacatgctgatcattcgcggcgtcaacgtcttcccgtcgcaggtggaagagcagatcatgcagttcgagcagctgtcgccgcactatcagctgcaggtcagccgcagcgggcacctggacacgctggcggtgcgcgtcgagctgaaagaatcggcgctcagcctcagccaccagcagcgttgcgacatctgccaccagctgcgccaccacatcaaatcgatcgtgggcgtcagcaccgacgtcagcatcgccaactgcggcgatatcccgcgctcggaaggcaaggcgcagcgcgtggtcgatctgcggccgcgctgaggcgcacggcgtcacggatgacgccgccccaaattatgttaatgttgtggctcatcgaaggctaacccatggaaaaatatggaacataaactggatgagttcattcgccacgccgtcgacgcgcagccgatcagcggcacctcgctgatcatttcgctgtacggcgacgcgctcagccaccgcggcggcgaagtgtggctcggcagcctgagcgcgctgctggaggccttcggcttcggcgatcgtttcgtgcgcacctcggtgttccgcctgcaaaaagaaggttggctggcggtggagaaaatcggccgccgcagcttctaccgcgtgaccgagcaggggatgcgccagttccgccacgccgaatcgaagatctatctgcgcgagcagcccgcctgggacggcaaatgggagctgttgctgctggaatgcgccgaaaaaaacgcgcgcgcgcggctgaaaaaagagctcggctggctcgggttcgggcagatcgccaacaacctgatggccgcccccacccatgcgcagaccgacgtgacggcgctgctcggcgaactcaacgccagcgaacaggtgatctactttcgcgccgattacccctacaaccgctccgagcaaaccctgcagaaactggtggccgactgctggtcgctcagcgacgtggcggccggctatcacgaatttatcgtctccttccggccactgatggcgctgctgcgcgaagtcgacccggcggcgctgacgccgctgcgctgtttccagattaagctattattgattcacttcttccgtcgcgtggtgttgaaagatccgctgctgccggatgcgctgttgcccgcgcagtgggagggccaaatcgcccgcaacctgtgcatcaatctctatcagcaggtcgatcgcgccgcgacggactacgtcagcgcgctggcggagaccaccatcggcgccctgcccgcgccggccgccggttactatcggcgcttcggcggcctgccgcgcgaccctacatattaaggaactcacgctatgcctgtgtatcagattgacggcctgacgccggtcgttgaccccagcagttacgtgcacccgacggcggtgctgatcggcgacgtgatcgtcggcaaacacgtgtatatcggcccgaatgccagcctgcgcggcgattttggccgcctggtgatctgcgacggcgccaacattcaggacaactgcgtgatgcacggcttcccgcagcaggacacggtggtggaagaagacggccatatcggccacggcgccatcctgcacggctgccgcattcgccgcaacgcgatggtgggcatgaacgcggtggtgatggacggcgcggagatcggcgagaacaccatcgtcggcgcgatggcgttcgtcaaagccgcggctacgatcgaagccaacaagctggtggtgggcagcccggcgcgcgtgctgcgcgatctgaccgaacaggagctggcctggaagattgccggcacccgcgagtatcaggatctggtgcagcgctgcaaatcctcgctgcacgaagtggcgccgctgaccgaaatcgaaccgggccgccagcgcctgagcttcggcgatcacctgatcccgaaaagccagctttaatccccagggctgaggtgcgcctcagcccctcccccgcattactccacttccggcgccttgagcggcgacggcgcagccgcgcggcggctctggaagtgataagccaccaccagcagcagggtgaacggaataccgaaccacagcgtcatgcggaaaaattcggtaaacgcggtcgagatcatcagcgccgccatcagcccgccacccagtaaggtggtataggggaatccccacatgcggaacttcagatgggtctgccggtgccggcggcggaagaacagatgggtgacgaagatcatcagccaggtaaaacaggcgccatacaccgaaatggacatcatggcggcgaacgacgtttccggcgccaccaagctcaggacgatggacaccacgataccgatgcacgacatcgccagcgcattgaccggaatgccgcgccggctgacgcgccccagcgccgccggcgcttgcccggcgcgcgacagcgagaacatcatgcgggtggtgatgtacagctggctgttcatcgccgacagcgccgccaccagcacgataaagttgaaaataccggcggcggcgggcagatggatcacgttcatcgccatcaggaacgggctttcgccggtgccggactggcgccagggcacgatggccagcatcagggcgatcgacagcatgtagaagatgaacagccgcacgatggtgcccttgaacgccgccttcaccgcaatcaccggatttttcgcctcgccggcggccaccgcgatcatttcaatgctcaggtagctgaagatggacacgatcaccgcgaaccacatgcccttgacgccaaacggcatgaagccgccggcggtcaggttgcgcaggccataggccgggttacccgagaacgccagaatgccgatgccgatcagaataaacgccacgatagccgttactttgacggtggacagcgcgtattccacctggccgaacgatttcacgccgatcacgttaacgacgatcaccgccgccgagaacagcagcacccacggccaggtcggcgtcgccgggaaccagaactgcatgtacatgccgatggcggtgacttcggtgcccaccgccaacaccacgcaggaccagtaagaataacgcaccagaaaaccgaacagcgggccgagatagaattcggcgtagtcgccgaacgagccgggcgttgggtgttcggaggtcatttccgccaggctgcccatcagcagcagcgcaatgacgccgccgatcaggtagctcagcaataccgacggccccgccatctgaatggcgtaggcgctgccgagaaacagcccggtgccgatggcgccgccgatcgccagcatcgacatctgtccggcggtaagatgcttgttcaacccgccctgacggcgggcgatatgctcaaaatcattcatctgtggcatggctgtgctcccgggcggagttaggcggtacgggtgacgtcgagaatggcggcggtcacgtagtcaatgttgccggggttaagccccggcagacacatgcggccgggcgagaccagatagatggcgtagcgctgccgcagggtctgcagctgcgcttcgttcaggccggtatagctgaacatgccgcgctgctcgagaatgcgccggtgatccagcgaagagccgccctgcgccagcccggcggccagctgttcacgcatttgcttgatgcgcgagcgcatttccgccagctcattgcgccaaagctcgccgagttcggcgtcgccgagcagggtttccacgatctggctgccatgcgtcggcgggcaggagtagctgcggcggatcagcgtttttaacgcccctttgacgttggcggcattttccgcgtcggcgcagcgcaccgacagcgcgcccagacgctggccgtacagcgcgacgtttttggaaaacgaattgcagaccaaaaacggcagatcggttttcagcgcttggcgcaatgcaaagcagtcctcctccagcccgtcgccgaagccctgataggcgatgtcgaacagcggcagcaggttacgccgctgcagcacggcgagcgtggcgcgccattgctccggcgtcagatcggtgccggtcgggttatggcaacaagggtgcagcaagaccacgctgcccggcggcaggctgtccagcgcatcgagcatggcggcgaaacgcaggccgcccgccgcttcgtcaaagtagggataggttttcacccgcagccccgccccttcgaaaatcgcccagtgattggcccaggtgggatcggacacccaaatttcaccgcgcgtcagaaagtggcgcagaaaatccgccgccagcttcaacgcgccggaaccgccgacggtctgcaccgtggcgatctcggccgcctgttgctcaccgaacagcagcgactgcacctggcgagcgaactgcggcgaaccttcgatcggcggataaccgtgcgggcgacgcagcgccagcagctgctgctcggcggcctcaaccgcctgcatcagcggaatattcccctgccgatcgtaatacagcccaatgcctaaattcacttttttcggattgggatcctgcaaataggcttccatcagcgacataataggatcggcggcggaaggtgcaatctgtttaaacatgacgcatccttaactcgttattgaattaatatgaaggttgacttaagaagaaattaaatcaggcgatggcgctgacggtaatttctattttcattcccggcaccaccaatttttcgacaatgaccgtggagcgattgggataaggataattaaagtatttccggtaaatatcatcgagacatttaacgtcgttgacgtcggtgagatacacgatcacctgcagcaccttatcgctgtggctgcccgccgcctccagcgtctgcgccagattatcgaaggtcagcgtaatctgtcgctccggcgcgccggtgtcgatgctgccgtccgcccgcaccgggccgtgagcggtaaacagcatgccgccgccccgggtggcccaggaaaaaggctggccgatctccggcagcccggtctctacgatctcgcgcatgtcagtggttcccgtggtggttaagttggtgaagcagcgcgccgtcggcggcgaacaacgcatccagaatggtaaaatgattggcgccgggcaccgcgaccagatcggccggcagcccgcgttggcgcagcgctgcatgatagtgttgcgactgacctctcagttccggcagctccaatgcgccgtaatacagcgtaagcggtttgccgcgcgtcggcaggcggcgtgccgggctgagcgtttcaatctgccgcgcgctcagctgcagcgcccgattaacatagctttgttgcaacggcgccagctcgaacaggccgctgatgggaaagacggcatccaccaacgcatgctgctgccagaacgccgccagctgcccgccggcggaatggccgcacagataaaccggatgggcatagtgcggcggcaggcggcgctgaatagcatccagcgccatcccgacctgtcggcatatttcgtcgagatccaccgccggcgccagcgcatattccaccaacaccacgtcaaaacccaacgccagcggcccggcggcgataaaggcgaaatccgccttatcgcagaattgccaatagccgccgtgaataaaaattaacgtcccctgatgccgctttgcagaatagagccaatcaaatgtttctcgttcgccgttgccataagcaatattattttcatggcgcgtctgtttataaacagccgcgctgcgagtttgaaatgaagtcaaaatagccgcttcattatccaccgtggcgccgttatcataactccccgcaagtggtttcatatattaaacttcgtttattatttaaaatgtaaattaactattagcaccggcaagattattgtcaagacgggcgcgtcagcaatgcgcgcccggtaaaataaaacctgatgaataatgaaaaagtttaacccatgaaactttttgcgcttatttcccccgcccgtccggctgaatttgcggcaaggcgctgagccgttcaaatgcataatcccaaaaggcgcgcaccttcagcggcatgtgctgcgcctgctgcgccaccagctgtaccggcatcggcaacggctcatgatccgtcaacagccgcaccagcgtaccggcggccaaatcgtccgccacctgatacgagagcaaccgggcgacgcccttgccggcgcgcaccgccagcagttgcgcttccacgtcgttgagcaacagccggggagtcaatcgcacgcgctcgccgttttcctgcgggccgaagcgccattcgcgcagcgacggccgctgggtgccgacgatggtggcatgctccgccagctgcgccggcgatcgcggttcaccgcagcgcgccaggtaatccgggctggcgaccgtcacccggctgacctgccccagccgccgcgccacgcgggaagagtcctgcagatgaccgatgcgcaccgcgatatccaacccttcgtcaatcagatcgagattgcgatcgttcaataccatttcgatctgcatctgcgggtaatcatcgagaaatgccatcaccaccggcgccacgtagcggcggccgaactgcaccggcgaggtaacgcgcagcaagccgctcaactgcgcctcggcggtatcctgcaccaccgcctgataatcctgcagcagctgttgcgcgcgctccaacagccgtgcgcccgcttcggtaggcgccagccgccgggtcgtgcgctccaccaatcgggtgccgaaacgctgttccagcgcggcgatggcccgggtgatcgccggcgccgaacgccgcagtttgcgcccggccgccgccaggctgccttgctgcaccaccgccacgaaaatcgccaactcgtctaaccgatccatagattcttccgaaaagtgaaattatcaatttccacattgccggatttcgctcgttcaacgcaagagtatgctgacaaaaagcactgaggagaaacgccatgtccaccatcacactctacggcaccccgctttccggccacgttcatcgcgtggcgttgctgctgcgcatgctggcgctgccctatgcatgggtcgaagcctcaacggacgtacggcagagcgcagcctttcgccggctgaacccgttcggccagatcccggtcttgcaggatggcgatctgacgctggccgacagcaacgccattctggtctatctggtgaagcgctatgcgccggacagccactggctgccggaacagccggcggcggcggcgcgagtgcaggcctggctttccaaagccgccggtgaagtccgctacggcccggcctcttgccgactgatcgcccaattcgccgtgccggaggactatcaggcggcgcgagcaatcagcgatcgttttctgccgcagatggaacagcacctgagcgagcgcgactacctggccagcgaacacccgaccatcgccgatctggcctgccacagctacgtggcggtcgcggccgaaggcggcatttcgctgtcgccttaccctgcgatacgtcgctgggcggcgcgcatcgctgcactgcccggcttctttgccatgccggccctgccggaaccggcggggagctgacgccatgatcccgcaactgttccatcccgatgagctgcgcgcgcagacgctggccgggtttggcggcgtaggcggtggcatctaccctgcgatgccggatcagcaccgcgcgtttttcgccgcgctgccctacctgttcgtcgccacgctggatgaacaaggctggcccatcgccaccctgttcaccggcccgcccggatttttacgcacgccggacgacacgcacctgcgtatcagcgcaccgcgtcgcagcgacgatcccgcccaggcgctgttgctgcccggcaaaccggtcggcgcgctcgggctggatttcagcaaccggcggcgcaaccgcgccaacggcaccgtcggccgcaccgacaaaaaccgggtggagatcgtcgttcagcaaagcttcggtaactgcccgcagtacattcagcgccgcgaactctacccggtggacagccggccacagccggttgagcatttagcctcgctggatgcggcggcgcaggcgctgatccgcaccgcggataccagcttcgttgccagctgcgcgcacctggcactggcgcagggcggcgtcgatatttcccatcgcggcggccgccccggctttatccacctggaaggtgacacgttgtggatgccggactttcgcggtaaccgctacatgaacacgttgggcaatctgctggccgaaccgcgggcggcgctgctgttcatcgattttgaacgcggtgacgtgctgcatctgcagggggaaacgcagatcctctggcaagcagaggggcatcccggcgttgaaggcgcagaacgctattggcggtttgacgttcgccgcgcctggcgttttacggcggcgttgccgtggcgggggcgtaatctggagtattcgccggcgacgctggcgaccggggtgtggcagcgctgaaatgaaaagccccgctgcggcggggctggatcggaaattacaggctgtgttcggccgccgatgcggcctgataaagctgacgaaaataattcaaccgcgcaaagaacaggcggctttgctgctccgacatattgccggccacctgcccggcgtcaatctgccgcccttgccattccatcagggcgattctcgacgccaaaaaatccatttcgctgccgtaggccgcgagatgtctgtccactgatttcatcattcgcacactccttttaattacatcgaaaagggtcatatgcctgctctttcagtatcggcccggcgaaggatattttttgtacagaaggtgcgcataaagaaaaccaccatcttgttgccgcgtgggcaaacggcggcggcaaaatttgctagggtaaagggtagccgtatgggatagaccactctgttgaactcagcaaaggaagagactcatgagcaccagtatctgcgctaccctcaaggatcccacgctgttccgcgaggccaactacatcgacgggcaatggttgccggcccaggaaggccgttcgatcgccattcataatcccgccaacggcgaacggatcggccacgtaccggccttcggcgccgaagaaaccgcacgcgccatcgccgccgccaaaaaagcgctgcccgcctggcgcgcgttaaccgccaaagagcgcgccggcaagctgcgccggctgtttgaattgatgatggaaaatcaggaagatctggcgcgcatcatgacggcggaacagggcaaaccgctggccgaaagccgcggtgaaatcgcctatgccgcctcctttatcgaatggttcgccgaggaaggcaagcgggtgtatggcgacaccattccacagccccaggccggtcgccgcatcatcgtgcaaaaagagccgatcggcgtgttcgccgccatcaccccgtggaacttcccggcggcgatgatcacccgcaaagccggccccggctgggccgcaggctgcaccggggtgatccgccccgccagccagaccccgttctcggcgctggcgatcgccgtgctggcggagcgcgccgggctgcccgccggggtatgcaacgtgataacaggccccagcaaaggcatcggcggcgaactcaccgccaacccggacgtgcgcaaactctccttcaccggcagcaccgaagtcggtgcgcagctgctggcccagtgtgcgcccaccatcaagaaaaccagcatggagctgggcggcaacgcgccgtttatcgtgtttgacgacgccgatctggacgccgccgtggccggcgcggtcgcctcgaaataccgcaacgccggccagacctgcgtctgcaccaaccgttttctggtgcaggacggcgtatacgatgctttcgccgccaaactgaaagccgccgtcgccaagctgaaagtcggcaacggcctggatgacggcgtcaccatcggcccgttgattaacccggacgcggtggaaaaagtgcgcgagcatatcgccgacgccgtcgagcacggcgcctcggtgctgctgggcggcaagcctgacgcgctgggcggcaatttcttcaccccgaccatcctgaccgatgtgccgcgcacggcgaaaatcttccgcgaggagacgttcggcccggtggcgcccctgatccgcttcagccaggaggccgacgccgtcgaactggccaacgacacgccgttcggcctggccgcttacttctacagccgcgatatcggccgagtgatgcgcgtggccgaagcgctggagtacggcattgtcggcatcaacgaagggttgatttccaccgaggtggcgccgttcggcggcatgaaacactccggtttgggccgcgaaggatcgaagtacggcatcgaggactatctcgaaatcaaatacctatgccttggcggcgtggatgcctgatgcgttcggcccccgcacctgcgggggttctgtctggcgtttgctatctttaggttaggcatctttgtgcggttaaaagggattgtctctatgcggcccatctcggtacatctgcccggcttttacgtcgccggccaaacagtcagaaccaccaaccagaacgaaacccaagccgaaacggcaaagattcccgcgctgtggtcggattttttcgctacctcacccgccctgccggtatacggggtctattccaattacgcttccgacgccagcgggccgtttgacgtcaccgccggcagtgaggcacagagcggtttacacatccaacccggccgctatctggtcttctccgcccatggcgcgatgccggcggcggtcatcgcaagctggcagcgcatctgggcctacttcgaacaacaccctgagatcgaacgccgcttcctgaccgacttcgaagcctataccggccccgacgcggtcgatatccacatcggctgccgctaacgcgacaatgaggtcaacgatgatcgccttctcgcccgccattccgatcctgcgtatcttttcggtcgacaaggccaaagagttttacctggattttctcggtttcacgctggaatgggagcaccgtttcagcgaagacctgccgctgtacatgcagattgcccgcgccgggctgacgctgcacctgagcgaacactacggcgacagcacgcccggcgccgccattttcattccgatgcaggacatcgatgcgctgcaccgggagctcacggccaaaaactaccgctatgcacggccgggcctggagattgtcgattggggcaaggaactgaacctcaccgatccgttcggcaaccgcctgcggttctgcgaacagaaccgcagatcctgagcgccgttattgccggtactccgcctcgctgaccggctccagccaggtcaccggagtgccgtccagcgcttcggcgatggcgatatgagtcatggcggagtccggcgtcgcaccgtgccagtgtttgacgccagccgggatccagacgatatcgccggggtgcatttcctgcgtggcctcgccccacatctggatccaaccgcgcccctgagtgacgatcagcgtctggccgagcggatgcgtatgccaggccgtgcgggcgccgggctcaaaggtgacggttgcgccgcccactctggccggcgcttcgccggcgaacggcgcgtcgatgcgcacctgcccggtaaaataatccgccgaaccgcgctgtgatgggatcgaaccgctgcgttgtattttcatctgttttatcctccgcgccggctctcacaaccggcgctgatagtcataagtgagtgatgccaagatagcgccatgcttttccgccgactagcgggtaaaatgcgcaaggagctatgagctaaattcataaatctacgcgcagccgcgccctaaccttgctcttcggtgccgatatgttgaaagaaaacgttaacgacctgatcgctttcctgatggtggccagagaacgcagcttcaccaaagcggcggcgcagcttggcgtttcccaatcggcgctcagccacgctatacgcgggctggaagagcgcctggcgctgcgcttgctcacgcgcaccacccgcagtgtcgcccctacagaggccggtgagcggctgctcaacagcatcggtccgcgctttgcggagatagaaaacgcgctgaacgcgctgggtgaaatgcgcgatcgcccggccggcaacatccgcattaccgccggcgaacatgcggtggatgcggtgctgtggccggtgctgcggactttcctcatcgattacccggacatcaacgtggaaatcaccgtcgacaatagtctggccgacatcgtcgtcgggcgtttcgacgccggcatccggctgggggaacaggtggcgaaggacatgatcgcggtgcgcatcgggccggacatgcgcatggtggccgtcgcctcacccgcctatttcgcccgtcacggcctccccgccacgccgcaggcattgcaaaaccaccgttgcatcaacatgcgtttgcccaccctcggcgggctgtacgcctgggaatttgcccgcgatggccgggagatcaaagtacgtgtggaggggcaactgaccttcaacagcctgcgccagcggatcgacgctgcgcagctcggcctcggtatcgcctttgtgccggaagacagcgtcgccgagccgttggccgacgggcggttgcagatgacgctggacgactggtgcccgccgtttcccggttattacctctattatccaagccgcaggcaacacaccaccgcctttgcgctgctgattgaggcgttgcggcgcggggcttaacgcccgacgtttttctgcagatgcgccgggtaacgatcgccgatcacgtcgatagcggagagcgcgcgctcaatctcgcccagttcgtccgccgccaacaccaccgacgccgccgcgaggttctcttgcagccgatgacgcttggtggttcccgggattggcacgatccacggctgttgcgccaacagccaggccaaggcgatctgcgccgacgtcacgcccttgcgctgagctatctgccccagcacgctcaccagcgcctgattggcccggcgtgcttcggcgctgaagcgcggcaccaggttgcgaaaatcgccgctgtcaaaggcggtgtcttcggtgatggcgccggtgagaaagcccttgccgagcgggctgaacggcaccagaccgatgcccaattccgccagcgtcggcaagatttcacgctccggctcgcgccaccatagcgaatattcgctttgcagcgccgtaatcggctgcaccgcatgggctcgccggatggtttgcgctccggcttccgacaagccgaagtacttcactttcccttcgcgaatcagttgctgcaccgtaccggccacctcctcgataggcacttcgggatcgacgcgatgttgatacagcaaatcgatcgtctctacccgcaggcgcttcaacgaaccttccaccgcccggcgaatatgctccggacggctgttcaacacctgttgccccgccggctgcggcagatcgaaaccgaacttggtggcgatgacgacccgatcgcgcaccggcgccagcgcttcgcccaacaattcctcgttggtgaacggaccataaatctcggcggtatcgaagaacgtcacgccctcgtcaaccgcggcgcggatcagatcgatcgcctgccgtttgtcggtggccgggccgtagccaaaactcagccccatacagcccagacccaacgccgatacttccagcccttctcgccctaacttgcgtgtttgcatcttcactctcccactgaatgatactggctccgcctgacgcggcgccgctccggtgtggtgactgtaaaaggcggctgccgccatgactatggggcaaaatacgcttgagcttatgaaccaggctcatgaatccgttaaccgttgctgggaccagcgtttttgcgggaacgttcctgcccgagatactctatactgatgtcaggatgccttacccttttcgtttagcgtcatgtagatggagcgacagatggctaactctgaatcgacctgcgattccctttcaataccagtggcagatttattccatgaccaataagaaaagcgccgtgcttaccccggctgcaatgctattgctacaacccatgtttgccagccaggcgctggcggcagaaaataatgaagagaaaagcgacaccctggtggtgatggcgcaacccatcggattgaccgagctgggatcgccggtgtccgtcagcgtgatcgacgggcaagacctgcgcaacgccgccccgcagattaacctgtcggaaaacctcggcagcgtgccgggcctgcagcttcaaaaccggcaaaactatgcgcaggatctgcagctgtcgatacgcgggttcggcagccgctcgatgttcggcgtgcgcggggtgcgcatgtacgtcgacggcattcccgccaccatgcccgacggccaggggcaaacctccaatatcgacatcaattccgtcgaacgcatcgaggtgctgcgcggcccctattccgctctatatggcaacgcctcgggcggggtgatcaatgttgatacgattaccggcacccagccgccgacgctggaggccggcggctatttcggcagcgacaacacctggcgctacggggtgaaagcgaccggcgccaccggcgacggcacccaggccggcgacgtcaactatgctatatcgggaacccgcttcactactcagggctatcgcgatcacagcgccgcgcgcaaaaacctcggcaacggcaagctcggcgtgcggctggacgacgtcagcaccctgacgctgatgttcaacagcgtctccattgacgccggcgatccgggcggcctgaccgaagcggaatggaaggaaaacccgcgccaggcgccgcgcgcggatcaattcaacacccgcaaatcgctcgatcagacccaggccggcctgcgctatcagcgccagatcagcgagcgcgacgaactgacgctgaccgcctaccacggcgagcgccacaccacgcagtaccaatccattccacgcgggccgcagctcaaccctacccacgccggcggggtgatcgtgctggaaagaaaatatcagggcattgacactcgctggaagcatgaggatactctcgcctcgttaccggtaacactgatcggcggtctggattatgaaaccatgaccgaacgccggcaggggttcgaaaactttattctgcgagacggcacagtggactacggcgagaaaggcgaccagcggcgcaacgagaaaaaccgcatctggaacctggatccttacctgcaaacctcctggcaactgacgccgcactggacgctggacgccggcctgcgctacagcacggtcagcttcgactcgaccgactattacatcacgccgcgcaacggcgacgacagcggcagcaaacgttaccaccagtggctgccgatgggctcgctcaactataaaatcaacccggcgtggaacgtttatctctccgccggccgcggctttgaaaccccgaccatcaacgaactctcctaccgccccgacggccagacgggcctcaatattggcctgcagccatccaccagcgacaccgtcgaactgggcagcaaactgcgcctcggcaacggcctgatgagcgccgccctgttccagaccgataccgacaacgagctggtggtggcggaaagcagcggtgggcgcaccagctacgccaacgccggtaaaacccggcggcgcggcctggaactggcgctggatcaagagttcgcgctggactggcgcctgcatatggcctggacgctgctggacgccacctaccgcagcgaaatgtgcggtaaatccggctgtacccccgccggcaatcgcctgccgggcatcgcccgcaacatgggctacgcctcgctggcctatgccccgccggaaggctggcacgccggcgcggagctacgctacatgagcgacattcaggccaatgacgccaacagcgcgcaggctccctcttacaccgtggccggcgtaaacgccggttatcgctttacctggaaccgctgggcgctggacgtgttcagccgggtggacaatgttttcgatcgccgatacgtcggttcggtgatcgtcaacgaaggcaacggccgctacttcgagccggcgccggggcgcaactggggtggcggcgccaccttgtcttatcgctttgaataaggcaaagcaccttaaggttaaaaaacgggatgggttttacgtcaccctagcggcttctcgctgaaataatagggagaaaccgcgtgttttttccgatttggcttaatctctaaatcggggactttcatttttggtaagggtattgctatgcaaaataaagcgtcactatcgccgcttatcgtcataacggcgctgtttgccgcgctgagcgggctttatctgctcggcggcggcatctggctggccaagttgggcggttcgctgtattacatcatcgccgggctggtgctgctggcgacctcctggctgctgttccgccaccgcgccaccgcgctgctgctgtacgcggtatttctgttgggcaccactatttgggccctgtgggaagtgggcccggacttctgggcgctgacgccgcgcctggacgtcaccttcttcttcggcctgtggctggtgctgccgtttatctaccgcaagctggtggccaacggcaaattcgcctacggcgcgctgagcgcggcgctggcgatcaccgtcatcgcgttggcctatgccgtgttcaacgatccgcaagagatcaacggcacgctcgacgccgcgcaggtacagccgaaagacgccaccggcgccgactggccggcctatggccgcacccaggaaggcacccgttactcgccgctgagccagatcaacgacaaaaacgttggccagctgcaagaagcctggcgtttccagaccggcgatctgaagaccgccaacgatccgggtgagatcaccaacgaagtcacgccgatcaaaatccgcgataccctttacatgtgtacgccgcaccagaagctgtttgcgctggatgccgccaccggtaaagaaaaatggaagtttgatccgcagctgaagtacaacccaaccttccagcacatcacctgccgcggcgtgtcttaccacgaaaccgccgcagccgcaggcgccacaggcgatgccgcaccggcgatgtgcgcacgccgcatcattctgccggtcaacgacggccgtctgttcgcactggacgccgaaaccggcaaaccctgcccggacttcgccaacaacggtgagctgaacctgcagagcaatatgccgtatgcgacgccgggccactacgagccgacctcgccgccggtgatcaccgataaagtgatcgtcatcgccggcgccgtgaccgacaactactccaaccgcgagccttccggcgtgatccgcggcttcgacatcaacagcggcaagctgctgtgggccttcgatccgggcgcgaaggatccgaacgccatcccggcggacgagcaccacttcgtgcctaactcgccgaactcctgggcgcctgccgcctatgacgccaagctggatatcgtttacctgccgatgggcgtttccactccggacatctggggcggcgatcgcaccccggaaatggaacgctacgccagcggcctgctggcgctgaacgcctccaccggcaaactggcctggttctatcagacggtccaccatgacctgtgggatatggacgtgccggcgcagccgaccctggcggacattaccgacaagagcggtaaaaaagtgccggtgatctatgtgccgaccaaaaccggcaacatcttcgtgctgaaccgcaccaacggcgaactggtggtgccggcgccggagaaaccggtaccgcagggcccggccaaaggcgatcgcctgtcgccgacccagccgttctccgagttgaccttccgtcctgagaagaaactgaccggcgccgacatgtggggcgcgaccatctatgatcagttggtctgccgcgtgatgttccacagcctgcgttatgaaggcaccttcactccgccttccgagcagggcacgctggtgttcccgggcaacctgggcatgttcgagtggggcggcctggccgtcgataccgatcgcgaaatcgccatcgccaacccgatcgcgctgccgttcgtctccaaactgatcccgcgcggcccaggcaacccgattgagccgccggaaggcgacaaaggcggcagcggcaccgagtccggcgtacagccgcagtatggcgtgccgttcggcgttaccctgaacccgttcctgtcgccgttcggtctgccgtgcaaacagccggcctggggttacatttccgccgtggatctgaaaaccaacgacatcgtgtggaaaaaacgcatcggcaccgtgcgcgacagctcaccgctgccgctgccgttcaaaatgggcatgccaatgctgggcggcccggtgaccaccgccggtaacgtgttcttcatcggcgccaccgcagacaactacctgcgcgccttcagcgtgaccaacggtgaaaaactgtgggaagcgcgcttgccggccggcggccaggcgacgccgatgacctatgaggtcaacggcaagcagtacgtgctgatctacgccggcggccacggctccttcggcaccaagctgggcgactacgtggtcgcttacgctctgcccgatcagaagtaaccaccgccgttagtaccccgcaaagcacgccgcaaggcgtgctttttcttttcccgccccgccggctgttccctcgcaatacccttaattttttcactcgcattattgataatggttatcattcgcaatattatacctctgcggccccggcagcggctgcgatcctctccagcttaatgggcaatacaacgatcggccgccttcgggcggccctattcggaggcgcatggtcgaccatactcggaagcatcgaaagaagatcctgcaagcggcggtgaaaacgcgacgcgccggcctgacgttcgcgccggcgtcgccagccacgtcgccctttatcggccagcaccgccagacgcaagccgtgctgatacacctgatcggccatgatgacgcccaggaggaacatgaatgaatctgcagccctttaccgccatgctgatgttcgcctatgtgctgctgatggtgccgctgctctacgtcatcgacagccgcctgagcgccagcaaactggtgcgcaaagccacgcaaaacctcatcatcatcgcgttgacgctgctgttcttcagcgcgatgacgcttttatactgaggccatctcgccggtgccccgcggccgacgttacccggcctcccggcgtttggcccgcggatatttccacagccagcgcccgctgaccatgcgccagtagaacaaggcgccgcgcaccgcccaatcaaggaacatccccaaccagacacccaccacgcccatgcccagttcgatacccagcgcgtagcccgccaccacgcggcagccccacatgccaagcatcgtcacccacatggcgaagcgggcgtcgcgcgcgcctttcagcccggcgggcaacacccaggaagcggcccagatcggcataaaggcggcgttgagccaaatcagggttttcaccaccgttttcacgtcatcctgcgaggtataaaacgcggcgaataccccggccaacggcgccgtaccccaggcgatagcggtcaacccgagggtagacagccagaaaatatggcgcagctgccgttccgcctgaccgatctcgcctttgccgagccgccggccgacgatgatggtcgaagccgagcccagcgcattgcccggcaaattgatcaacgaagcgatggagaaggcgataaagttaccggcgatcacgttggtgcccatgccggcgacgaacatctgcgtcaacagtttgccgccgttgaacagcaccgactcgacgctggcgggaatgccgatccccagcacttcccacaggatgctcatcttcagcggcgtgaaatagcttttcaacgtgatgtgcagcgccggattaaaaccgatcgccagcacatagaggatggcgatggcgccgatatagcgggaaatcgtcagccccagcccggcgccgacgaaccccagcccgtgccagcccagcatgccgtaaatcaggatgctgctgatgatgatattgaggatattcatgccgccattgataagcagcgggatcttggtgttgcctgcgccgcgcagagcgccgctgccgatcagcgcaatcgccgccgccgggtagctccacaccgtggtttgcaggtaagagagcgccagcgctttcacctccggcgaggccgcgccggcgatcacatcaatgatcggttcgcccgccaggtgaatgcccgccgccaacagcagcgccacgccggtcatcagcaccagcgactgacgcgccgccgcccgcgcccgccggcgatcgcgcttgccgaggctgaaggccaccaccacggtggtgccgagatccaccgcggcgaaaaaggcgatgatcaccatgttgaagctgtccgccagccccaccccggccatcgcctctttgccgagccaactcaccagaaaggtgctcagcacccccatcaacagaacgcaggcgttctccagaaaaatcggcaccgccagcggcgtgatttcgcgccagaacagcacgcggtagcttttccgtttggcgtaccagggcgtattttccacgcgctgacgcagtgcggcatacaggttcaaggtgggctcgatggataaaagtgaaacatcatttcaaatgatgagcgataaatcgttatcctgcaaagaatttttgggcgcccgtggcgaacgcccgacaggcacaccgcagcgctactccatgtagtcttcctgatcggcctgcgccgccgcgataaagcgcgcggtgctgcggctgagcgtggcgcatttgtccgtcagcagctgattgtcctgttgcagagtcaggtaacgcgcctgggtgagcgccggcaactgccgataccctgccgcctgcgtgtcccagccgcggtgctgcgccgcacgcattgcggtgcgctgcagcttcacgtcgtccggtatctcgctgcgcccgcagtccacgcgcaggaaatgcccgccggccaacatcaaagcgatgtgatccaattgcgcctgcagcggcggcgccggttgatgcgccgtctgctgacaacccgcaagcagcaacaacgccgctacgccgcaaagagacgcgcgaaacagagtagacatggacgctcccggaaacctgtgggtgatgcaatgatcttaggtgagcggatgccgggcggcaaggcgggcagcacgcttagcgccggccgctgctgaccttggtggcgcgggcggggttgccggcgacgaattccagcgtgggggaatagtaaaacggcaaccaggcgttatagccgctctcccactcccatttgaccgggcaaggccacagcatgtcttcatgcaggatgtaatagatccaccgcccgggcgggcggcgcggtttgcgcgttttcatagcgggttcgacggcctgatggaatgcgatagggtcaactgctgcattttaccgcgatttgggccgcggggacagcctgcgttgccggcttcggcttcgcccccggcgcccgcaagcgccctttattcaccgccgcctgccggcgcgccgctctcggtccccagcaccaccaccctgtcggccgagtcgatggtcgactttctgtgggcgacgatcacgcgcgtaatattcagcgaagatatcgcccggttgatcgccgactcattctcaacgtccagatggctggtcgcttcatccataaacagcacgctcgggcggcgatagagggcgcgcgcgataaacaaacgttgcttttgcccgccggagatgccgttgcccaactcgccgatcagggtttcgtagcccatcggcatctgcatgatttcatcgtggatattgctgtgtatcgcgcaggccatgatcagctctttattggcattgacctcaaacccgctgatgttttccgcaatggacccggagaacagccggtcgtcctgcagcacgcaggcgatcgcgttacggtagttattcaccccgactttatggatatccatcgcgtcggccaaaacctggccggaagtggggctgagcaaaccgcacatcaccttcagcaaggtggtcttgcccgcgccggaggcgcccacgacggccacgctttcgccggccgcaatgcgcatgttcaggtctttgaagatcggccgcgacagcgcgtcatattgatacgtaagattttttacctcaatggcaatccccgtgcccgaggggaaaacctgtcgcggcgcggactccgtctccgcatcggtaaagacgatgtcggatatcctctcattgtgcagcgacagcatgcgcaagccgatcgccaggtcgatcaggctcgaggcccgctgagagaactggccgcgataggcattgaacgccatgaacatgccgagcgtcatggaattgtcgatgaccatcatggcgccaagccacaggatcgccacctgatcgagcgtcgtgataaaggtattgatcccgccgaacatcatattgaatcgggtgattttgatattggtattggcggcgtcgacgttcagattgagccaatagctggagcgcgtttccttgatgcccagcgccttgacggtagaaatgccgtacagcgtctccatgaaatgcgagttggccttggccgccttgacgatctgctcctccgagaattgacggtaggttctgtaagtcatcatcctgatgaggatgtagatcagagtgaagcccgccacgacccagaccagccagccaccatagaccatcatcatcgcgaacagcccgaccgtcatgatgccgtcgatgatcccgctgacgatattattggtaaaggtggttctgatcgcatccagcgaggaaaagcgcgattgaatgtcccccaggtgccgtttttcgaaaaaatccagcggcagcttcatcaggtgttcaaacagcgtcgtcttccactgaatatcggtcagcgtcccgagcacgatggagatccaggccctggcgatgctgaccaccgcgcggaacaaggtgaagaagatcagccccaaacagatgaccgtcagcaggctgtagtcatgcgcctgaatgacatggtcggtcaccagttgcgttcccaccggcagcagcaggttgaccgattcgatgactatcgataacgcaaagatcttgagcagcgtccccggcaggccctcgatgtttttcatcaaatccagcaggcgcaaacgggtcttgagggtctctttttgaaatgccctgtcgggccacagctccaacgcgatgccggtaaaatgattcgacatctcctgcagcccgatcactcggcgcccgaaggccggatcgtgaatgacaaaaccggcgcgctgcaccttaaccaacaccacgaagtggttcatattccagtgcagtatgcagggcgttttcagctgattgatttcgtcgatgtccaaggacaaggcgcgcgtcttcagctggatttgcgacgcgatttgagagatcgtccccagggtcgcgccctgggtggaaatgccgaatcgttgccgcaggctcagcatatccacattaaacccgtaataggaggcgatcatggcgaggcacgccaggccgcattccgatgattccgactgcaagatgctcggcacccgcttgcgcagtgagaaggttaacttctcgttgatccgttcaaagagattattgtccttcatcgactcgccccacaacgctgttttttatgtcatacaaaggcgcgaccgcccactgataaagcggtttcttatccaggaagacgatgaccctggcctgcagcccgctgctgatttcgagatatttgcctttatcgctgaattgcgtgtcgctgatggacgccagcactttgtagtaggcgttcctttcccttttatttccgctgctgtattccgacatttcctgcggggaggcggggaccgatgagatggattctatttttcccggaaactgaccgaatttatccgacgggaaggcttcatagcgaatgttgatgccatcgccgattttcacgtagggcaaactgttattcggcagccataaaaccagataatatttgatgttatcaatcggcttgatttgcgccagactgctgccgctctcgaccacctgcccggcggtcacgctcagcgactcgattttccccttgagcggcgctttgataatgacctgaccgccggcattggactccgccagctggcgttgtaaatcactgcgttgcgattcgctttgcgatatctgattgtcgtaatcggcggcgcgaatcagcaaatcgctgcgcaactgcgacagctgaatattttgctggatcttttggctgtagagcgcctgatacgagctttgctgttgttgaaaaagcgaacgctgataatttaactgatctttggtgatcaggcctttcgtcaaatagtgttcgtaatttttcaggctatcccgcattttatccatcccctctttggcgctgaggttcagtttctcggtttctttataggcgttttcatagctattgatctgtttgcgcaaattatccagcatggcggttttatttttattcagcttgctgattatcgaatccagattgctaatctgtttgcttatttcgctggccgcgatatggctgacattgccggacgtggtgcttctcgagacatcaatcacatacagcggctcgtccttttccacgacgtcaccggctttatggaatgcctggctcacgtaaccgtattgggaagaaaacacattggtggaatgcgggatgctgatcacctcgccttcaacatcgacccggcgcgtgtactcgcaaaaatagagtgcgcccgccaggatcagaataaaagtgaaacaggtggcggcaatcacatggctcgacgcgccggaaattaacagcgccctgccggtccatctttgacgttgataattgaccgcctcctggcggaaaatattcctgctcttattatcactcataggaagaacctgcgcttgcctgaccgggagacagccgcagcgagaacgctgcggctttggaccgcatatggatttagctgatggtgccgttaatcagcccatcgaggccttttttggagtattccagcgtggtgtcccagccaataacggctgcggccacgccgctggctacgccgcccaggatgccgccggcgaccatgccgacgccctggccaatcgagccgacgcccagcaggccgccgccgtcgccgccgtgcttaccgccgatgacggcgcccgccatgctgcccacggaggcgcccagagcgatggatgaaacggcttccgcggcattggaaacggcgctgccaatcagccccgacagtccattgctcatatcccaggaataagcgcctgacacttcattcatttcgataacagacagttctttcattggttaatctccatatttaaacggacaaacacggccatacatgcgtgttgtcattgcattggcatcggcctgcagcgcctgatgccaccaataatgtcgcgcgaacagacgacattatatttttaatgggggtctctttaattctgcgtaatggtgaatgtcatcaccgcgtcggcctgcccggggctaatggctcccgtttgcttatagcgcgccatcaaggggatcctgatctctttttcagccgcggtgtggtaattgatcggtctggaaaacgttaatggattacggttctcatccaacacttccacggcgacgcccttcgccgcatcggcaccgtcggcgatatcaatcattcccacgcctggcgaatttccggccgcctcgaacgtgacctgaaccggaatattgtcctcctgacattgcagaaccacggaaaaattgcgttcggaagacgccgccgtgctgccgacgccgttaaactcgctgcgtttagggctgcccagattcaccgtttgatttttatagttcaaatcaaccaggcaacttttctgaatgaccttcatgccggaaatactgagatccaaaatggaggtcgaatccagataatatctggcgataattttcccgcccatatcgccgccggttttgatcggaccggttttaataaacgtcagccgaacatcgtttcgattgatccacggcgtcagcaagttgggcgaaatcgccgtgttgacgggcacgttcttattgctctgccataagtctgaaatcgtcacccccacgccctctatgccggtttcaaatacgccgggcagcgcgctcggcgtcagcggcgacatggagcgataggcgaccgaaccggaacaaagaaaagaaaacgtcgtgccgttcatactgttctcggttcgaacagccaactgctcgccgacttcaatgcgcggatccacggccagcgtcagcaaccccatacgggcggttttcgcgttggtggtacaggtgccggcataaaccgccgtcgtgagcgtcgccagccacaccagggcgccgtaaccgaatatcctgagaaaaacgttcattttcactctcacttaaaagtcatgatggaaatagagcgagatctattggcaaacgccgtttagggtttggagacccgctgacggcggctccgccggcaactgataacggatgcggcattggttctcgccattcctgccccactgcgcgatgagcaggcccttttccgccatgccggtcagatagaccacgccgtcgccgccgaccaggaacggctgagtcgccccctcggcaagacgcaggctggcgcccagcggcaggggggccccctgcgagtccgtcaccttcatcaaaatccgtctgccgacgttggctttgaaattcgcccggctcaccgcgccgcgagtcggcgtgaccgactggttcgtcaactcgagatcgacatcatccggcaagctgtcgacatcgaggcgaatcgaattgttgcgataaggtgtggcgtaaggaacgatcgcgtagccgcgccagtcggttttcaccccgacctgattgccgaccgccacatcgctcgcgccggccgcctgcaccagggcgacggtttcgccgaacggttgaccgaaggtcacgccgtcttcatgggcgatcaccccgcccttcaccccgtagttgacgcgctgttgactgcgatcgtaggcgtagcccgccgtgagttcgccgtacgtcgcgcgccagtcggcgttggcgttgccgctgttgccctggccctggctgccatacccttcctgtacgctccaactgaggttgccgccggccagcgccgtgccgttgaggcccgccgtatggctggtattgccttttttgctggtgttgaggttgtaggtggcgtaggtgttgctcagccatttctctaatggcacgctgatgttgaaagcgaagatctgatcgcgatcgtaaatgcgcccgcggttcgaatcaccgtaaatagcctgtgaattccggctgtagctgtagttaaaaccgtagctgatgccattccaactattgttgtaacccgcgctcagcgactgcatattgcgctcggagccccaatagtcttcggagaccgcgctgagtgaaagcgaccccgccccttcccataaattctggttcagcgtgatttcgccgcgatttttgcggcggtctatcggggcgtaacggttgccgctgcgataggtgtccagcacttcctgcagcccatagtagccgctggtcgaatagcggtagccggcgatggcgaagttcgtccccgtctcgacgatatttttgctgtagcgcacacgccacgactgaccatcgcttttcggctgatgctcctgctttgcccacgcctgggtgacgtcggccgacagggcgccgaactcgcccaggttcttgcccagacccaatgccagcgattgatacggcccggcgaattggccgccgccatacagggtgaaaccggcgggcaagccataaatcaggctggcctgcgagaagatctttttatccacgctgtgatcgtaagtgcggtattgccccgaggtcagcgcatatttcagccgcccttcgcgttgcagcaccggcaggctggcgaagggaacggtcaggtgctgttcgctgccgtccgcctccttgatagtcacctccaaatcgccgctgccgccggtcgggtacatgtccgaaatttcaaacgcgcccggcgcaacgtaactctggtagatgacatagccgttttggcgaatgaccacttgcgcattgctgcgcgcgatgccgcgcaccaccggcgcataaccacgcaggctttccggcaacatgtcgtcatcggaagccagctgcgcgccgcgaaacgacacgctgtcaaacacatcggacgggctgctgctttcgccgagcgtcagcaagcttttcaggcgaataatattgcgctgggcgtaggtatagacggagtcccaacgatcctccgacgctcgcccgccgccggcgctgttgtagctccaggtggtgtagttccgcactcgccaggcgcccaggttgaagcccggccgcaggttgaggtaataactgcttgcgctctgggtgaatcgatcgcgccccttgctgttgctgccggtgaagccgtagttcagcagcatcgccggcaggccttcatcccattgttccggcggaacgtatccgcgcaccttattttccaacgccgcctgggggatactcagcatcaggcgttggcggttaaattgaaattgcgccgaggcctgtgggatcgcggccaaattcgcgcagcgatcggcgccggccaaaccgggaaacagctcaactttcaccccaagccgtttcagatcttcccgcgtcaaacaaggctgcagatcggccttctcgtcgctgccggcccgcagagcgaacgacacctcgcgcgtttccagcagcatgtcgttcacccaaatatcgacccgatacgtgccgggaacctgctggccattttcaaaaatcgacagatcgacgtgctgctggcctgagcgcccagtttccagcaacgccggattaaaatagtcacgagagaaggcgggattagccatattgccgcataccgccgttgttaccgtgaataaggctatgcgtttcagccaagcatcccgcttcgctaatatacgcttttgagttatcattcattagctccattattgaaatgttttatccctttttctgccttcccttacagattaaatacctgactgatgttctttacctgtgccgccataatcattaattaatttccagcttaccgacgttgcgcccgccacgggcaatacaaacatttcgctgctcatcggcgcgatatatgccacctctttcatttcccgccccccgatacggacataatggaagttcatataataaggcgttgggttggtgagttttaattctgaaccgacacgctgccatttcagctgctgcgtcacttcttcgggtacctggcggagcagcggcgccggccgataaatcaatttaatgcgggtcttgaccgctatttgcagcgtattcgatttacccgtctgtgttgttgaaggaatggatttaatattcatccaatacaagctttctttatctttcggtaagtcatcgcccactttcacgatgcgcagcatattttcctggttgccgtccaaccgaaataaaggcggcgtaacgataaacgcgattttatccactccgctttgttgattatccagccaggactgaatcaaatacggttctttatccggattctccacgctgattgacgcttcttttttttcgccgttgaatatcacccgcgtcccgccaatcaccacgccggcgtgaaccgtagacgcaaacaataaaataatgagagccgctaaggcgccgtagcgattaaaacgcataatattatctccgaggcaatacagcccgctgtgaaccagcgggcaagaaaatattatcagttataattcagcgtaaaggtggcgacgctattggctttaccggcggtcacatctgcctgcgtggaaatatagcgggcggtaaaatcgaggttatttttcacgccgctgccggaagccaacggataagccgtcgacgccgtgtaaagcggcagaacactgttagaaatatcagacagttggataccgacaccggtagcgacatccgtttcctgagtcagctgcaatacgttgctgtcgccgttatcggccgcgccgtcaaacttaacggtggcgctttttaccgtatccggacaatcggtgacttccagcgtgaattttgtcgcgctggacgttgatcccttgccacccgcaaatgccgttcgggccacatcacccaaaacaacatttaatggattactcaagtcattcgtgaccttgcacgcagcatcgacaatattcccggtaaaattaacctgaccatctgctgccagagcaggtaaagcgcttgaacacgctgccgcgacaaatgccaacataatcacttttttttccatcatgggtacttctccttttgattagacagacttcaaaatatccccgccacggagatcccggacagggagaataggagccccgctcctttcacagttaattatgcttagctttccccctttagcaatacataaaatcaatgtaaagatgagaaaagataattaccccaaatagaattagcatcattcttaattttattttgaaaaaaccgccaaatcggcgtttcttgattcattcatctggcagcaagagaatttattctcgcgctattcgaaggcgctttcgccagatcctcctcatttccccctcaggcgaaaaatcaggtgacatcgccgtaaaatgaaaaccgggcgaaaaaactcgcactgaaataaatgacatttatattacgaaagacatcacgacgcggcggcagcgagaggggcagcagaatagcaaaagcatggcgataaaggagggagaataaggcattcgccgttcgtgaaaccggcgcgatcatatgacaacgagaaaatggcgttacgcagaaatattctgtctggcgccgttcactatttcgaaaataaggcggcaatgcgctctgtcgcgcagaataacgcattgccgccttattgtttttcggcgccgctaattaatcgtcatggcgataatcttcacccaaccctctgccgggtagggtttcacacgccagaccatcgcccgcgggaacggcggacggatagttatcgtccggcgtgataaagaccggcgtggtcgcgataaacccatcgttgaacaccgcctcaataaaggtggcctcccagccttgcgccggggcggccagacgaaactcgccgcgatcggcctccgctgcggccaacggctccggggtaaagcgtacgccgcacgaataacgaaaatctcgggccgtgcggttgtgcgcgctccagcgccgcacggtggccggcggttcggaaaaacgcagcgtgcgcaccgcagcatccgcggcgctgccttgcacctcgatcgtcggcaacgcgatatcgcgctggcggcgcttgatcatcgccagtatggcgcgttcggcgaccggccggcttgccgcacgatccccgtcggcaatcgcgcgcagcgaagcctctcccgctgaggcgctgaaatagaatcgcgtgctgtccggcggataacgttcgtcgccgctggcgatgatgacatatttcggtaccgctggccgcgctcccgccgtcggcggcggataagcggtgggatccgctatttgcatcagtttatcgaacgccggcgtctctatgcgccgatcgatgccgagttggtaataaggatgaaacgccaacggccaacggccgccatacgtacgataggtatgcttcaagacctgccgcgccgcgaccccatccgggaacatggcgacgacggcatcgatgcgctcatccgacaatgacgccagccacgccgcggttgcgccgctcgccgcgcccgccacgatgaatttatctatcccccaccggctcaattcgcgctgcgccagcgtcatggtttgcgacaaggccgccgtcatggggatcgccagcggcatcatcaagtattcatccgcatcgtccaggaacaatcgccagcctcgggcctggctatcctcccccgcacgacgccgcccctcattttgatattccaggtacggataaggcagccggttgacgacaatcacgacggtgtgactttccgccgccaaggccgccggcatggcgacggaaaacgccgcattttgcttgcctggcccgctcgcccctgcggcggcgcaagcgcagtcatcgctcatcagcaccaacgctttacgggcaagcgccccgttggggatataaatatccacatcgtgccaccattgcgtcggccggatggcgtcttgcggcgaccaggattgcgacatcaaccgataatgacgtatcgacacgtcatggccgttatccacgccctttaacgaatatgacagaggcaatatcgccaactgattgttataacaaggaataacggtgtgcaaggcggaatattcgtccgcaaagcagcgatcttcctctgccgccatggcctgccggccgccgattaaggccaggcaaatcagcgcgatgtatccgatgcgttttagcattttttcctcccccctttgtccgtggcaaatcccttttacgccgcctggcggcaggaaaccttccgcgcgcctagagcacctgatgaaagcgtatcggatagccaaagctgtccttttcgaacgccacgtccctgtcgttctcgcccagcaataggctgtaaacgccgttttcctcataacggctcatggcgatatacagcacgacctcccgatggtcagcgatcgtaaactgtttgcgcctggcgttgatttccaacgtaaacgccaccacaggattgttgttcagaaataccgaggtctgctgcatggagacgatcctgccctgcgctttctcggtcacctgaaagggcgtggcgtcattgggggcgcgtatatccaccttcttttggatatagataaagttaaacaccgccaacgccaccgccacgaacagattgatggtcatgatcaagatgattttattcgccatgaactccccctttgccgttcttccggctcccgacatgtgcgaggtaaaagtgcccttgcgggcacttttcattaagggccgggcttatgacgatttacggccaaacagctgcgagaaggcgctaatcccggcatcgatgacggcgccaatgccctcaccgagtttggcgccggcgcccgccgcatccgcgtggatcccgaatagaccggtaccggcatctacgatggcgccaatgccattgcccaggattttgccggcatcggaagcgatgcctgcgccggaaaccgccatgacttctgcttcagtcagttctttcatactgtctcctttgtatttatcgacatgtttagtaatgaaaaaatgaaaccctcactgtttgttcacctccttgttatctgctcacgaaagaccctgttgccaatgcgttcacccgcgcgacggtgacaatgtcagaacaggccgaactcacggcagagataatcggcaacgccattgcggctgttgggcaacgcaatcgggttaaacggcagggcgcgcttcaattcgcccatcgcattgcccatcaccacccccgttccggcccagcgcagcatgtccaaatcgttcatcgcatcgccgaaagagaggcaatcgcgcatcgctatctgtttggcgctcagatagtcggccacgcttctggccttggaaatatgcttatccatgatgtctatcgtttccgcagaggacttacagatggacagcgtttttccgaaagcctgactgacctcgtcgtaaaatcgctcgatcagcgccgcttcaccctgcagcagcactttcaggatcggttgccgtttcatcgcctccggctcgacatagcggcaagcgacgcccgaggttttgatatagtcggcaaaatgcggattctcttcggccatcatccatccttcctgggtgaacaacgtcacgtggagcggacaggcgaagaggtaatccatcaacatcatttgactgtcgcgaggcaggaaatagcttttatccgccaccggccgcccctcgatattgaccatcgcgccattgcaggagacgatcgccggcgagaaccccaagccatccacaatcccgcgcgcatccgcatcgcaacggcctgtcgcgatgacgatttccagcccgcgggcatgcagaatattgagcgtttccaccgtcagatcagacagattcccggcaggatccagcaaggttccgtcaagatcgctcacgatcgcccggtattttattttgccgtcgatagcaagccacatatcacgcctcctccgcctggataatcccgtcttcggcgcggatttcgctgtcgggcggaaggtgggcgatcgcgagcgcaatggcctgaaaacggcgccctaccgcaccgatggtctcctgagctatctcgtgagaatcataaaacagtgaaatggcgagccgttccgcttcggggaacaagcacagcaccgtctggtggttgctgccgctgacgatatccgtcacctggaacgtaaacggcaagcgcggatccttctgcggttgcggcatgttttcaaacacaaacaggctgccgaacggcgaagtgggcacccattgttcgtcgtagcggttcagttcggaaaaggcgtacttctgcctcagcgtctgggaatccgcgatatcggccagcaacgcataaatgggccggcggcgaatcgcctgcaggcgcagcaccgggctggcgacacacaggccaaacagcgtctgcacctgctcaatgtccgccgggcgctcgctcatggtcgtgccgatcgcgatatcgtcacaggccagcgcttcggccagcgccagcatccaggccagctgcgtcagttgattgaccgtgatcccctggcgccggcaaaacgcagtgaggcttgccacctgttccgcgctgaattccgcgccatattgccgcatgcgtcgcccctgcggcgcggcatccggcgaagcgctcaacggcaaacgttggttgaccggcgccccgcgcaaatagtccgcccagaacgcctgcgcctcgggatcgtcgccgtgcgcgcgcacataagcggcgaaaggctcaaatcggttaatttccagcgccggcgcgcccccttccagcaaggtgaggtagtcgttgaaccagtgttcgaacagaacgccgagggaccaaccgtcgaacaagatatggttaaaggtctgcaccagatagtgctcatcggcgttcaacttgatcaggcgccagcggatcaacggcggcgcatccagctcaaacgaggtttctcgttcccgggccaacagcgcttccatcctttcttccagcaaggacggcggcgcgtcggtccaatcctcgatcgcgatcggcgcctgcagcgtctcgcagatgaagacgttgggccgcccacggcgggtttgatcgccaaacccggcgcgcagcatttcaaatcgctgcagcgccagcgaccaggcctgattcaacacctccggctgcagcgggccggccacctcataaacggcctgatcgatctgatactcgcggttaagccggttgaaatacatcagttcccgctgcgtgaccgtagcctcgaaaacggcggcgatgcgatgacgttgctgccagcggtccaactcggcgaggctgacgttggcatgggggaagtcccccgggctggcgaggcgaacgccctggctcgcctcgtggcaacagtgtgcgaccagcgccgacaggctctcccgatagtgcgaaccgatccgggccagcgtcgcctgcggcaataagcccgacatcacgatgctcagccggtcgccgtgcacgtagagcaccagatccagcacattgtcgctcgccggcagcgcgccgttttccagatccgccgtttggtcgatcaaggcccacaaggcgtcgtcagtctgttcgttaaagaccccgagatagttgaatgcaatggccggcaagcggtggcgccgcaggcaggctatcgcttcgtcgtccgacgctgaaccgtatttcagcgccgaatagccgatgccgtgatccggcatctttcttaatgcgtccttgatggcgcgcagcgtgtgttttgggctctgatgcgcggtgatgcgcaaaggcagtaaggcggtgaaccagccgacggtgtcgtcgagctggatcttatcgtcattgatatcgcggccatggtgttcgagcgtcaggtaactgtccgcacggccatgccaggcctgcaacaccggcgccagcgccgccagcaacacatcgcgggtcgaggtgcggtaggcctgatgacagctgtccatcaacagcgtcgtcaacgccgcgtcgcactcgaagcggcaaaacgccggactctgcgccccctcgctgagcgtggcgtaatcgggttgcccggcgatcatcgccaaccagtaagcgcattggtcatgccggctcgccgcgtagtgccttaacgtctcgccccactgccggtagctggtgcctttcgccgacagcgattccccctgatgcaaccgtcgcatgtctctgacgatgatgcgccaggacaccacgtcgatgatcagatgatggaatgcgcagaacatcagcgcgtagccgggcgcgctgctgtcgaaaatgtagacgaagcggcacagcggcccttctactggatcaaaccccgattgccattgatgcagaagttcggcgcggctttggcgacaaagcgccaggtcatagtatccccatgaagggccgccgtcggccaccgacagatagcgctgcgcgaccagcgcgccggcgtcgtcggcgctaaaccgcgcgcgcagcatgtcatggcgcgacgccagcccgttcaccagatcggccacgcgctcggcggacatcggcggcacccgcaccaaaaaagtctggttgaagaaggcgcgatgttgcggcggctgctcgttgtaccagcgctgaatcggcagcaattcgaattcgccctgcagctcgccctgttcattgagcggcgcaatcgcctcccgttgctgcaaaatgcgcttggccagcgcccgcgcattccgggtttcgaacaccgcacgcgagttgctgtgatagcccgacttgctcaattcgctggtgaacacgatgctttggatcgaatcgccgcccaaacgaaagaagtcgtcatccacccctacccgttcaacgccgaggatctccgcccacagggcgcaaatcaacgcctccagcgcgttctgcggcgcggcatatcgctcgccttgcgcgaattgcggcgcgggcagcgccgtgcgatccagcttgccgttcaccgtcagcggtatctcgtcgagcgcgacatagctggacggcaccatgtaatccggcaggatccgctccagccgggcgcgcaaatcggcaggatccagcggctcgccccgcgccatcagcacataagcggcaaggcgcttgctatcgcgatggacgacatccaccacgacgcatttctcgacgccctccagcgcattgatcgtattttctatttcgctgagttcaattctgaaaccgcggatttttacctggcaatcgtttctgccgagatactccagattgccgtcgcgcaacgctcgcacccgatcgccgcttttatacaagcgtcgcccgttcagcgtaatgaaacgctcttgcgtctgctgcggctggttgagatagccgcgcgccagcgcgtctccgccgatatacagctcgccggccagccctggcggcaacggctgcagccagcgatccagcacatgaagttcgcgccccggaatggctcgcccaatcgggatgctgctgcgggtttcgtccgccgcgatggcgtacatcgtggtgaacgtggtgcattccgtcgggccatagccattgatgacctgctgcgggcggttggcttgccgcaccaggcgctgcatcagcgtggcggtcagcgcctccccgcccaccagcagacagcgcagcccggcgaacaggtcggggtgactgaggtaaagatgatcgaacaggctgcgcgtcgcccacagaatcgatacctgctgccgacgcagcagggcttccagctgcggcacatcgccggcgatatcctccgtgtcgcgcacgacgaccaatttggcgccgttgagcaatgcgccccacacctcgaacgtcgccgcatcgaacgccgggctcgagaggaagagcaacgcgtcatcgggcgtgacagcgatgccggacgcggtcgccaacccgcacatcgcgtgttgctcgagcatcacgcctttcggggtccccgtcgatcccgaggtatagatcaccgcgccgagccggtcggcgccggtgacggccggcagattctgccgctcgtgcggcaggcggttcagatcgcccagcgtgaggacggacacggcgtgcggcatcatcgccgccagcgcctcggcgaccgattgcaggctttccccggcgatgagcaccggcgcgcgcgtttcttcgagaatatgccgaatgcgcgcctgaggataattgcaggagagcggcacataggccgcaccggttttcagcaccgccagcagcgccaccaccatttccaggcttttctcgctgtacagcgcaatcagcgtgtccgcctggggagcgcccccggtcagcgcttggtagcggagcgtaatttcgcgcgccaggctattcgccatgccgttcagctcacggtagctgacatacagcccctcaaactccagcgcaatcttatccggataacgcagggcgatcgcctcaaaccgggcgctgagggtttctctcggcaacgcgggggccgcgtcgtcatctggcggcatgtcggcggcgggataaaaggcgaggtggcgtaaaggcgcgtcaggcgcgcgcatcgccgcttgcatcaagcgcatgaaatgttccgcgcagtcgcgcatatcttcttcgtcaaacatgtcctgacgaaaacgcagccggaactgcaaggcatcgctgtcggcccgatcctcatattccagggaaagcgacgcgctggccatatcgtggttggcttcaaacagcggcgaagtggcgcaatcggccagcgccaaggccgcatcgcgcaggttggtctgggcaaaggaaatcggcagcgcgcggatccccagcgcctgcaccacctgttgcgtgggcagttgattaaaccgttggcgcgagtgcggcaccgcggcggtaataaacgccagcgcgcgttgataaacggcggcgaagccttcgccgtcacgcagcgagaggggcatcacgctggtgtttacatgtccgccaagcgcaaatctttgccctttttttatcgacaccggatagctgatatagaccgtttcctgattgccgctgcgcgccatcaagatgccccacagcaccagcaacgccagaaagtcattcattcgccgtattcccgcgccctgcttcagcgctttccattgcgctttgggcacctggaaacgcagctcggccgcctcatcgcttcgcacggcgccgcttttctcaaagggcacgtctatcgcgcccaaatttgccgcttcggcccgccagtgcgccagcgctccgtcggcggccagttgttccacctcgcgctgcagctgccggttgatggcggcaatctcggccgcctcgaggcgtgtcgataaccgctgttgaccatagtactggctcaccaatgagaaaaactcgtcggaagacgcgccgtcgatcaccagatgatggcccaccagcgccagggtatagcgccccgccccctcggcgaaaagcgcccaacgataaagcggcccgcggtaaatgtcgaagggctggcgaatcacttgggtcagcagcgtgcggtccgtgtaatgctgcaaaggatggattgcgtcattgcgacgccaatacagctcgccattctgttcatgaatatggctgttcagcaggacatgatcttgcaccagcgtattcagcgcagcttgtaatctgatgggatccagcgcgccctcaatacgctgcagcaccaatacattgtaattacagccctctggatggcggtcatattcatcgataaaaacttttgaatagggtgatacaggaatctcttccatgacaaacactccatttagaatacacgtgccctgcttaacggcgatccatgcggcatacccaaacctctttcggcatcagctcgcttatcttttctgagtaataaccgatcagcatgttgatgcgcttttctgcaatgacctccgccgcctgagcgcaaatcgacttgtaaaaaccaatagggatcatcactttgcaacggctatgcaggtgccgacaaacgccgatggcccaggaaaaacactccctggaaggattggaaatatccaaaagttcggcacactcactggaacagccaatcacagcgtagagattgcctttattgatataatgaattttatgataaagaggatgtttttcaatatattcaaatgcgcgatgatctttttctcgccccagattattgataaaactggcctgccgcgcttggccgccctcggtaaaacgaaaggccataaacttatcaggctttaaggttaattcgacgaagggatagatttgcgtattggtggttaaatactttctgaaaatcttttcataaaccctgatcttcctgtcatcggaaaagcagatatccgccgccacatccgaacgcttagcctgcaggaaaaaatctttcaagacggtggaagatttgacctgacggtggatcccaagatcgccaagcatattgacgttaaaagacaatttattgattttaaaaggataaaaactggatacaaacatcccgagataacgttcttgatccttgtaaaatatgcccgttttttccatcggcgccccacaatgcggatcgagcaaatgcttccagtgcaggaaacgctccccgcccaaatctctgccataaagttcctgcaataatttgaaatgattatgagaaaccgcttccctcacaaagacagccatgttttatctccctataaaaccgattccatgccgggcggaaatcaataaaagatgaccgctcagcgccgcttataatacggcgccggaccgttcgcttcctttccctgattaacaagagtcgctgtgcatttttaaccagcgcaagaattcaatattattatcgatgttcagttttctcatggccgaacgtttatgaatactcaccgttttcgggctgatgccgagcaacatcgccgtttggttttgtgaatagcccaaatggatcaaacggcacactttcccctcgctaaaggtcaactgggtacggcaacgcgggcaatagcttgaaaccaaactatttttcttgcgatagcagaacatgaccttgtccacgatcgccgccacgctgtctttgcgcgtaatacttccggcttccaaattgcaatgaattttagggaatgtctttttatgctccaatattgaaaaatagagcggaatagaagaaaagttgccctgcaaaagctgggtatggcaaaaatttatggacacccgcttgtccggcgccctgaatatgatgttggcacgttcttctcccgtgatcttggccttaatgccattcgtgagaaaaccttcttgcaaggcaagactcaaccccagcttgaagaattgatttttatccacaatagcgatattgacgcgctccattaacaaacctcccttttgactacgcttgctcactctccttactgcaatatcattgctgtgattattttttgttttaacgtgctttttaataaaaaagcgttataggcgaagcaaaaaaagccatgcctcgcaaaggtgcattttatatatagggttatataaatcatctgccctggagagcatacaaaagcaagacgcggtaagctgccgcgcttcgcaagggaaattgttatcgtaagatatatttataaggcatcattgccatcagcatcacggtgctaagatttttctctgatacgttaattttactccaagagcgcaatatatccagataaatatcgaaaaaacacataatatagaacataacattgcgcggcattgattgttaagagaatccgtttatgcattaggaatttacttatgataaaggcaggataatgcttttttcgcccgtggcggcgggatcatcgcagaccctattaaacagagtataaccatattcattttattgtaaaaaaattgcataaaaaaaagctacactttatggcagtaagtgattcccgccctttcatgtagacggcaacaaaaaagaagaaggcgaacccatcggccgcccacgcaagaaacgccaggtaggattaaagatttttcaggagtgatgcgcagcgcagagagataacgcggcatcgttgacgagcaggatgaattatatttttttgatcctcatcagctttttggcctccaggcaggaaaccaatccgaggtgatctttttttagctgcttgtcgctcccaagaggaagaatgactttgaacgtttgcaacttaccgtgattattatagatatcaaagactatcaccggcgggccataacccaggatcatgcagtctaaaaaccgcaaaacggcgcaccccaagcggctcctggcctcgcggataattttatccgcaagctcatcataccggaaaggtctttccggcgtcgtcaataccttcataaggtctcccttctggtatatatcattccgatttaaaataataacctcataaaaccgccgccgttcaaggcgagtgagacataataatccagacttcatcaatatataatctaacgatgcaaaatcaatctaacaaaaaacacaatagtataaaaaaacagcgcgagttttattgaaaaaatgacctgatttgcaataattaaatggcctgaagtaaagggctaactgaaaaaggagtttcaatcatgaaagaactatccgcagtagaaattgaacaagttaacggtgctggtttttttggtgacgtaggcacactgattggcagtgcggtaggtacaggtattgataccatttccgcgattgccggtgttaacccggatgccaaaaccgttgtcggcaccatcggtaaaggtattggtctggctgtcgatgcgctgatttccagcggattgcagatcatctctaaactgtaataacaactcataatcatcccttcctattttttaattcgcttcattttaagcaccttcgcgggtgcttttttttacttcaaagaatcaaaaaatagataaggtcagaaaaaccaatatccaaaaaaacaagctgggtatcaccatgataaaaaaacccatgcgtttattggcgtttttgagcatccagtcatagatcatcgcaccactccttgtgaatgccgggaggcatttccgcctcccggtattttatccatcaagtttttgattacagtttcggcactttggaaaagaagtccgccatttcgtgcgggaaccctttcgcaatcgccggacgaagatcgtccatggaaacattaaaatctttcggctgctcgcccgtttgcattttttggtgtgcgttcacattcgattgcagaccattaaaaatgcccttcatattgccgaacatatcatcgcaagattttgtcacattactcatgaccgacttggccgcatccggccccgacatttgaatattgctgacgccttgcataaacggttgactcagcgacgattgggagttggtgcccaaattgccgccggccttcatggtttctaaaattttggctggatctaacatgtttatcacctctttacggttgtgtttacatcgctttcgggcacgagaatcctcgcaacgcccgtgaccaaagtgggaaatctttcatcgtcgagcgcaattccagtttgagcacgcccaccaccgacgacatcgacatcgtcagctctcgcctgtcgctggcgagcggcacgggattgctggcgtcgaacatccggaacaaggcccagggcccgtcgaaactggcgacctggatctggccggtgccggtgcggaaggtgagtcgaacatagctgccgcctttcgggcccggccaatcgatacgggtaggctggctgaagccatggctgtagttaatcacctgcccatcgatatccagggtcgcttccgtaatagtcggcgtcagggacaacggcctgatgaacatggagaaagacagcttgtcgccggcggtgaagaaggtatcgcggatcaggcgggcattttcaaacgcgcccagcgtgctggcattgacgatcccctctgaacccggtttggcattccatttctgcgcgttgacgtccacataaggggccaggttctcatcgaagaactgctgcatcgcgccgctttggccaaacatgcgcgagaagtcctcgatgccgacctccgctctggcgttgcgcgagaacggataacgcccgctgatgctgctcttgcacaagccggaggccagcgacgaagcgcctttgctcaggttcttctggctctgctgaatcgtctggctgtccccgacctgcaacagatccatcatcacgctgcgcaccggttccggctggcgcgccgcatccagctgcaggcgcttcagcgtgcccccggcgggcaccacctggccgccgcgcagcgaggtggacaaggtggtcaactggctgtacagcgcttcgaaactgcggctcagcggatcgttgctggcgttggtggtctgcaacagctgatagcccagacggcgcagcagctcgaagcgatcttccaccgcgcgctccggcgtgagacgaaaacgcgcgcgctcgccggaaatctcgcccagaatgtcgcgccgctgctgctcgatgcggttgcgctggcgatcgaaccagcttgccgcatcgccctggttggtgccggtcatgctggtttcgcgcgcggcgaaacgcaccagattggccagtggagaagaaggatcggacagttgacgcgccaggatcgccgcatcctcaagcccgttgaccggccgggcgcgcacgtcgcgcatgaacgcatcccatttgtcggcatactcgatgaggtaaagcttcctcgcctcgtcggccagcttctgcgccgaggccagcgagttcaccgcgtttttcccttccccactgtcgcgcagcacccaggactcttcttcgatcatgtccttggcggcgtcatcgagctgcgccaggaaaacgtcgcgatagctggcgcgggtatagaaccccggcacggcggtatcggtgaccgtcgcctggctcttgcggcgcagcatcaaggagacgttcggtccggcggcgtcggccaacgaaatatcgttgatcgccgccggcagcggtttctcttcgatgcggcgcaccacccgcacctgcatcggaatgttcatcgctttcacccgcgccaggcgcagcagatcgccgttcatcttcatgaccggcgcgtccggcaaagagaacatctcccgcagatggtaagcgaagatgcctttgttcatatcggtgtacccctgcggcataaaggtttcccagcgcgccatgaaccagtcgaccaaggcttcggcggagcgatgcgaaggttcgcccatcatcaggtacactttcagggtgccgtagacgtccttgttggacgccgagacgtcattcttgagttcgtccgcgatatagttttccaccgccggccagaagatctgcagcaaatggcgttggtaggttttttgcgccgcgctgttgatcagcttgtgctcgaaatagggattcggcaccggcgacacttcgccgcccaattgcgcgttcatgtagcccagctgctcataggcggaaatgacatcgtcgctgacgcggttagtcaccggaatttcccgcacgatgcgttttgtctcatcgaagcgcgccgcaatgtaggagatgtaatcgctctcccacaggtaacgcatcgccagcagattaaacgagaccgccaacagaatgagcaccagcacatagcggcccagggagctcatgcggctgccgagcggcctggcgtgcgaagactgctgcatcaccccgcgttcttgccgggcgtaatccagctccgggtgataaatgcgcccggtcgggcgagcttcatagatatccgccgcttccgcgttgtagatcgccccctgcggcgacaaggcgatggtgctgcccagccacacctgctgcagatggcaggcgtagcccaccggcgtttgcgggaagatctgctctaacagggaatacagcgggttgcccagcgaccccagcgactcggtgaagaacagcagctgctggcggttttggccgtccggcgcatcgtgcaacagttcgagcacgtgatggctgacgcgcgccaccatctcccggtagagggtttcatactgttcgaagggggtttctccctgttcggcgcggttcaggctgaagcccatacctttttgcaacagatcgtcgcccagcatcgacaggaaggtctcgccgccgaccagttgatcgaggtggctgatggtaagatagaccggcagctcgctgcggaaccacgaggccatctccagcaggcgcacgcgcagcgcgtcggcgaccgactttctctccgtcagcgaggcgtgcagcaaccaacgcgcatcaagacacagcatgatgccgtcgatgcccggatggcggcgatggcggcggatcagtttgaacagggtgtcgcgcgccctggcgccctcttcccccagaccgttcaactgcagccattcgccggaagtgtcgacatacaccgaattctccgccagccaccagttgcaatcctgggtcggcccgacgtccaccgtctgctgcaggccatagtgctcggccagcaagaagcgttcgccgctttcgccgatcagcgaggttttgccgctgcccggcggcccgatgaccagaaaccacggcttttcgctgacgtaacggcgcgtcaggcggtatttgaagcgctgccagggggtgcgctgcttcgccgtgccgacgtactgcaaggtgcgcaaagcgtcgtaaaagcgcgaggtcacgcgatctcgctgggcggtcttgcgtttggccggggccggcgctcgcgcgtggcggaacacccaggataagaacgtcgccacgaacggccacagcgcccagcacaggatcagcgcgatgatgatgcccctgacccagaccgacagcagcggccgataggtgccgatggcgatcaacgtcccaatccaccacaccaccgcacacagcagcaaggcaatcaccaatatgaatgatctacgtatcatataatttccttattatctctacgccggcggatgtcttagttatcctcggggacctcggcggctacccctgcctgatttaacgttgcagacggtgaagccatctccctctcgccgattttccaaaggatgtccacgcggcggttgcggcggcgcccttcttccgtcgcgttgtcgtccagcggctcctgatcgcccttgccgaccgaggtcacggtgcggttgtatttactgttggccaaggattcgcgcagcttgtcggccaccgtctgcgcgcgcgcctcggacagtttcaggttggagttgttggaggtgttgcgatacggtttgttgtcggtatgcccgatgacctccagatcgcccggccacggcgccagcgcctcccccaaacgctcgatgttgcgtttctttttaaactcttccgacagcttcgactgcccggtggcgaatgcaccgtcagaggtgaagatcaacagccagccgcgcggatcggcgcgcacctccagccacccttcgctgaggatttgcggcagcggctgcggcagcgtctccatgatgttgattttgcgcggctgcggcggtgtccaggccaaaatggcgttgcgcagcgcgcgggactgatcgtgcagataccaggcggccgaggcatacgccagcagcgcgatggccaggccgtagcacagcagcttcagcggcgtgatgcgggtcgccttgcgcaccactttgctcggctcggcatcggccagcgtctgcgtcgggttctggctgtacagatagccgtcaagacggttgcgcacatcggccaacagcacagcgccgcgttccatcacgtggtattgcccttcgaagcccagcgacaggatcagatcgtaaaacgccaggatctccttgttgcgcggcgaggcggccagataggcctgcaggtgctcgaagcacttttccccgccccaggcgtcgcgataaaactccaccagcaggctgagattcagttcgccggattcgagcgtgctcatgcagcactcatccacgtaggagcacagcagataggccagcttgtccacatcgctcggcgcgatgtgatccgccagtagcgtctgctgaaattgttggatctcacgcacgatctgcgcgcgcaccgcgcccggattcagctgtttctgatcgcgcacccgctccacctgcagcagaaccgggatggcggcggcgatcaacgggttgtcccaatggcccatcatcacaccgggcttgctcagcgcggcgcggccgaacagcccgctcgaggtcggcgccgcctcggccgggcgctcgcccggcgcgggctcgctgctttccggcgcaacgctttccgcttcataaggcttgggttcggggggcgtcgccaccccggcgcttcccggccgcagcttggcggccagcgcccgcgcgccgaaggacagcgcggcgatctccgccgtcgttttgcccaccgagccggacgcgggaaggcgcggcgtcgcgttgttgcgcgttaccgccatcgcctcgcgtatttttctctcgaattcgttcatcccaccctcccttgccttaatccccagacgtcaaaacgcaggtcggggaaatcacccacgatgctgagcgccatcgccgagccggccatcatttccttataaatcgggtcggcatgatcaacctcgaaatagatgctgttcgggtaatacggtatgtgccgcggcggcgaagccatcggcaacaagcgagcgcccggcaattgcagatcgatcagctgaatgattttctcgaccggccccagtttgacctgcgcggggaaatacgagcgcagatgctcgatggacaaaccgcagctgacggcgaacaccagtttttccaggcgcagctgcgagtcgttcgggcacagataaatgctgtcgccgcgatcgacaaacggcaacgccaccgccggcgcttcgatcaccagcgacagcgcgcggcgaatcgaggcgaagagctggaagtagcagttgtgcggctcatcgtgcagatacaccaaatcggcccgatcccagaggcgttcgccgccgggaatgatgctgagccgccccagcaggctcagcaacgtgtcgaacagggtttcaggatgcacctgcgggctggccagcagttggctgatgcgcaaattgaactcgctcaaggtttgcagcaacagcaactccagcagctcggaaagcccgccgatcgtcatatgcacgtccgggcggaaaaccgactccagacgctggctgatcagcccaagcaattcggtggtgaaagcgggcagccagccgatggcgcggaaatccagcatcggcggcaaggcgcgctcatccagcagcacccgacgatcgctggtcagctcgcgcacgaaaccgaccggcagcacgctttccgcgctgctgaccgcgtcctccaggcttagccgcgtcaccaggctgcccagttgcatcgtgcacacgcgcggggtcccttccaggctgacgccgtggttgcgatccggcacctcggcgtccatggtgcgaaaacggctgctttttcgcgcatcctggataagatcgatctgggcgttgccggcgatgtccatcagcacggacaggcacaccactttcccctggcagccttctcccagcaccagcggcggcggcagcggtatatcctcaggcatgctgaacgccgtgccgtcggggaaaacgcccttggctttcttcagcgcaaacttgccctgttccaatagcccgttgtcgatctccagcgtcaggaacccccaggtgaaggtttcgacgctgcgcaagcgcgcttcaatcaagtgctcgaaaaaacgttcctgctgctggaaatgctgcggttccatcaacatgccttctacccaggcgacgcgttgtttaggtaacatgtcattcatccattttgtcgttagtcactatgctgagtgacgtcatccccaccatcaccttcatttgcgaatcagcctgcgcaggggacttttgctcggcgagcggcaacacgccgctgatttgctgaaactccgccccgacgacgacccatcgctcttgccccgccggcacctcgaagcgataacgcaacgtctccctcggttgcaaaatgctctggtgccggctcagcgccccttccgacggcgccgtctcgcggcaaggagcaccgtcgccaatcccctcgggcatccaccccgagcgattggtttctatcacgcacaccttgaccggctgcgcctccccggcggcattcgggttcacgttgtcgttggcggtcacctcgacgtcgataaaccgcaaccggcgccccgcatccgcagcctcatcatgagaaaaccagctgcatccgccgagcatccccaccgccaacagtccccctgtcgccatcccccggagcgttttcaccatgctaaactcctatgcattaacgaaacatttggtctggctgggcgcgacctgagtggcaaccatgttgttattgttcgtcgtgctggaatcgcctagccgcgtgaccggcatgccgccggtgaaatacttgcccgatccctgcaccggctgcatctgggccgaatgcgtcccggaggcggcgccgatcaccccgcccgaatcgacggtggccgcgcgaatgctgccgaggttctgttcattgccgccgcaaaggaaacagttaggcacgttcggtatgccggtgttgttgggcgcagtgttcgggcccggcaccggtatcatcgggtcacagccggcaaagctgatcccggccatgttgttattggctgcagtcatggtggtttaccccatatgtatctggccgccgtcgatcttcagcaccgccgaagacttcagagaaccaatttcactgttgatgacgagggattgccgcgcatcctgaatgatgtgcttcgccagcacctcgtcggtttcctccacccgccggctcgcgtgcttgctgcgcacaaacaggcgttgagagatttggtgcagcgtttcggccacccaacggctgctgcgcgtcagcagcgtgaagtgcgggctgcgcagcgtcagccgcttgccgccctgcagctcgatctccggcgccacgatgcgcaagttggcgcagcggctgtccagcgtcatgacggcgttcgcctgttgccgcgacaagatctcggtaatgaccaacttgtcgccgtcggcgatgacgcaaacgcgatcgcccgccagcggctgaaccaagcagctggtggcgaccgccagacaatgggcgcgcatgccgtcgacatacagactgccgttggcgtcggccgccagcgtcaccaccttgcgccccccttgttcgggaagcggagcgctgcgcaccaactgcaaaggcgtcaccctggcgttggcatagaccttctgatgctctcttctggatttatacatatctgcttactcctgttggccgttgatacgacggttgccgcggccccggttgttgatgcgcataccaggcgtcgatcgcactcaagaacggatcggcggtaagcggcacgttttcggcgcgatgacgctgcgcgccatgcaggcgagcactctgttgctgagcggcggtcaacggctgttcgatcaggttcgcttcccgcagttcggcctgctcaagattggctaacgccagatcgcacgccctgaattccgcttgcggcaagatggcgcgcccccagttggcgccgcccatcgcgcattcgctgaaccgggccttctgcccctgcgccagggtcagcgtcgcgcgttcgaaatcgcagcgctgtacctgcgcttcggcgaagatcgccgaggtcagatcgctgtcggcgaacgaacacccctccagctcgctgcggtgaaaactggcgccctgcagctgtagctgcgccaaagtgcagcccgacaggcggcaggtgaaccagatgcgcgcctgccccgcgatcgtctgccagctgcacgtctccagctgacaactgcccatcacctgacgatccagggtcgacgcctgccacaggcactgcgtgagttggcaggcgtaccagttggcgtcctgtatcacgtcctggtgaaacatcaggttggtcagggtgctggactgcaccgccagatgccccaggctgctgcgttcaatttccgcgccgttgacctcgcaccggatcaaaccgcagtcatccagcagacaatcgccgacgtaacacccctgcagcgcggtgtcgttacacgccaaattgcacagcagcccctgttgcagcgtcaggttgtcaaaccggcattcgttgaacgacaggcgcatcaggctgccaccgaccacgttgacctgctgcagggtgcagccctcaaagcgcaccgcccgcaaatcacagccttcaaacgtgacgcgttcgaaatgacagtcgatgaaaaagcagtcgctcagcgtcaaccctttcagctcgcgatcgtggaaccggcgtttcttgaagatccgcggcatgggcggcgtctgcgccaccgcctgggcgacctccagttcgatcgcctctcggtcaggcagcgcctgttgaatcacgcggctttcagttttcatgcgcatagtccccatgaatgattctgcgcggcacccaacacgcacgctccagcagacaaccgctgaaccgcgtgccggcgtcctgccaggtcatcgccagatgcgccgccgccagattgcactggtcaaatgccgcatcgcgcagatcggcgttataaaacaggccttgctgagcgctgctgttttgccaacgtgagtgcgtcaacaggctgtctttaaaccgcacgccggccagatcgcagccggcgatcgcgcaggccgtcagatcggcctcgtcaaagttgcattcagtgaaaacgctgtactgcagttggcacctctccatacgcgccgctttcaatcccactttggtgaaacagctatcgctgaacacggcgtgggaaaagttcgcctgcatgcccgccgtcaggctctcgacacggcagcgttcgaaccgcacgccgcgccagttgccgccaaggaacgagtttttggtgagcgtcatctccagcgcaaccgcctcttcggcgaggcagcggttaaacacgcacgcgtccagctcgccttgcagaaactgcgcgcggatcagcgttgcgccattaaacatgccgttgccgatcgccgcgtgttcaaagcggctcgcggtgaaatcgccccgctcgaaaacgcagttatccagcttcacgtggtcggcgcgcaggccttgcccctgaggctccgccagcgtcacccgttcgaagaccgcctcttgccacacgctttccgccagcaacggcttttgcagcgtgcacgagatcatgcggatctggcgcagcgccgcctgcgtcaggttgaccccatcaaaaacgcagttttcgaaggtgcagttctcaaaagaagcctgcgagaaatcgcagcgctcaaagcggcactgcagaaaatgcctgcccgacagcgcctcgcagcgcaaaccgctgaaggtctttccttccacggtcgcgctatcggggaaaaacgcgtcattgccgtcttcggcgggaagatccggcaaatcgggcagcgtcacggaagccggctccgccgacgtttgttgctggtgcaaggcgatcgcctcgcggatgcgtcgatagaacacggcggaatcgcccagagaggtgggcgacggatcgtaacgcaagtcgctggggtgatccgacaccgcctggatgacgttcaaccccatctccgccggcatcagatccggatcaaacagaaactcaaagggcgaggcgtcatcgtcgctgcgcttgcggaatacctgttggaaatagtcgaacgagcgcggcgcatcgcagcgatccaacgccagcatgacggactcgatggactcgtccagcagatgcgtcaacggcgcattgccggtgaagataagcaaagcgatgtcgctgtcgggcaggaaccacagcgttttgcgctgcagctcgatttcctcgaggctgtcgctatcgtgacggcggatgaacgcccgtccgcgcaccgccggcagctcgccgcgaatcgcctcgctttgcgcgccgacgccctgcagctcgaagggcacccgatccggccacgccgcttccggcaaccactgcgccggcggcgccatctggaaataacgccgatcgatattggccggcagcccggggaataccgtctcgagataggctttgccggcgatctggcccgccaccttatcgatgtgcgccttgcgcagcgcaaactcgtgcggcaccggcgccggcgccgccagcggagagcgctcctgcgcggtcccctcggcggacagcgtcatcagcagcggccgcagcccgtcattgcagccgcggccaaacgggttctccttgttgtctttgccgccccaggtggaggtgtgatccagcggcacgctgaggaagggttccacctccatcgcgccgcgccgtccctcgccctcgacccgccaacggcgcttcagcccgccgatgtcggcgctgacattcagcgttttcaccggctgaccgatgccggcatggccggcgatcaggtattcggcgaacggcttcggctcggcaacatccaatatcggcaggctgagcggcacgcgcttccacgcctcccagatttcggcttcgttcacgaagtgttcaggccgggacaggtagcatccggccacgacgctgatgccgagccggctgtctgtcccgatctggtaacttcctttaatcgccaccaattgctgtggccgtatgattctcattgccgcgcctcgttagtttttgctttgcatcccgacttttttcaaatcgacgccggtctcggacagtgacgcgccggtatagctgatcgacacccctgtcgtgctggtgctgctgccggtattgctgacgctgctgccggtgttgctgacgctgctgccggtgctgctgacgctgctgccggtggtgccgacgctgctgccggtggtgctcacgctgctgccggtggtgctgatgctgcagccggtggtgctggtcgacgatccggtggtgctgatgctgcagccggtggtgctggtcgacgatccggtggtgctgacgctgacgccggtaaagctggtgctgctgccggtctggctggtgctgaccgtggtgtagctgttgctttcgccggtcatgctgttgctgatgctggtgaaggagttgctttcgccggtcatcgagtttgatacgccggtgcagctggtgctctgcccggtgaacgaggtgctcagcccggtgaacgaagtgctgacgccggtaaatgacgtgctcacgccggtgaacgaggtgctgacgccggtgaacgaggtgctcacgccggtggcggtgaggctgacgccggtcatcgacgcgctgacgcctttaatcgaggcgtcaaacccggtaatgctgaagacgtaatccttgtaagagacgtggttggtgaaccagtccgtaaaggtgcggcggatgatgtcgaacttgtccattcccacctcggtggcctggttgcgctccaccgtggtttgcagatcgcgttcggcatgcagcatgacgcgttcgttgttgcggttgtcatcgaaggtcaactggctggcatgctgcggcttgccgaagcgcagcgaacgcgacaccatgcccgagtagttgatgtattcaggtaactgataaggcggcgggttgtcgccgttatacacaatcccggtcaccatcggacgatcgagatcgccgtcgacataggtcaccagcacttcctggccgacgcgcggcatggcgatcacgccccagcctttccccgcccaggcctgcaccacgcggatccagcaagagctgtcttcctcggtggttttgtagcgatcccagtggaaatgcacgcggatgcgcgcaaatttgtcggtatgcacttcggagttgggcgcgccgaccacggtggcgctctggatgcccggcatctgcggttttggcgtttcgcgcagcgggcggaacggcacgtcgtcgttcaacgcattgaaacggcaggtgacgttgcggccgtcgctgctgctgtccgggccgtcttgcacgaacacatagtcgcaacgggtcagcttgaagcggcggttgcggttggcgtccgggtgcaaaatcaaggagaaatccttgccggccatcagcccgacggcgttgctctcgccaaacagcagatggccgtcgctttgcatttcttccaggcgcagccgcgccaggttttcaccgcgttcggtatccacataacccgccgcgtagtcgtaccactccagcggggtgttctgcaggccgaggcggctctcttccaccttggtttgcaggttcttgcgcgggttctggaagtcaaagtcgcgcagcacgatttcattcgggcgcactttgcgggagcgctggatgcgctggatcccttcgcggatggcgcggttttcttcgctgtccggcatgaacggcaacacggcgtaaccgaaatccagatcgtcgaaattctgccggtcggtgatcaccagcgtgtgtttatcctcggcgtgatcgaagtaataccagatgccttcgtcttccagcaggcggctgataaacgcgaaatccgtttcggaaaactgcacgcaatattcacgcgtcggataagtgccttgaatatccagacggtagtcggcaaaaccgtagcgcgagaagatttgctcgatgatgtcgagcacgttcaaatcctggaaaatgcggctgttgcggttttgcatcaaaaaccacagccaggtgctcagctccagcttataaacgaacttatcctgatgctgccccgaatcggaggcgccgatcacgtaagcgtaaaacggccgcgcgccgaaatccggcctttctatttgaatgctgatcccttgacccagcagagattcataatcaacgtccgcctgttcacattcgaattcgagcgtatattgcgagttgctcgacaacccttctttggtggtgaagctgagtggaaacgcatttaattcggctaacaccgggttatcaatttcgattaaaggcataacaacctctctgatccgatatcgaaccccgccccgcgtttacgggccggcggcaaattaaaaatcagtcgaaataaacacttaaactatcgttctcgaccatgagttggatattctgcagttcctgtcccgtccgtttgcgctgcagcacttcattgctgatgggcggcaaaatcgcctgctgcagcagcgactcgaccgctctgccgcgcgaaggatgggcgctgatgcgtttggctatccagcctggaatgtcgccttccagcaccagcgacacgcccacttctttgtgcaaacgctgttgtaaacgcgaaatctgtttggtggcgatatgggttatcgcttcggtagaaagcggcacgtagggaatgacgttcatgcgcgccaacagcgccgccgggaagaagcgcgccagcacgtcgtgcagcatcggccgcagcgcttcggttttcagatccggcgtttccgccagcgtcgcttctatttcgccggcgccgatattgctcgtcattaaaatgaaacactggcggaagctgatcatgcggccctcaccgtcttccatcacgcccttgtcgaagacttgataaaacgcctcgtggatatcgggatgcgccttgtcgaattcgtcgagcaagacgatggaataaggtttgcggcgcaccgcctcggtcaacttgccgcccttgccgtagccgacatagcccggtggcgcccctttcagggtggaaacggtatgcgattcctgaaactcgctcatattgaagacgatcaggttgtgcgcgccgccgtacatcgcctccgccagcgcaaacgcggtctccgttttgccgacgccactcgggccggacagcatgaaaacgcccaatggccgatcgtgcgcctgaatgccggcgcgggagatgcgcaccgcctgcgcgatttcatcgatcgccgtctgctggccgaatatctggcggctcagcagttgattgagattgagcgcattgtccagatcgctttgcagcatgcggccggtggggatgccggtccaatccgacaacacctccgccacgacgcggtcatccacccacggatacaccaacggcaggccgccgtcttgcaaggctcccagttcggaggccaactgcggcaagcgctccggcgactgccgctccgcgtcgagcaaggtggtgaccgcctgttgctcctgcgcctgccgctgacgcagcgcagccagttcgccttccatatcgctgagggtctgctgcaattcagtgatgcggctgagcgccagatcgtcgaatttgctttcctcctgcaggccgttcatttcggtgcgcttcaccgccaacccggcctcgagcgactcgattttttcaggcagcgcatgctggctcagcgccacccgcgcgcaggcggtgtccagcaagctgatggctttgtccggcagttgccgcgacggcagatggcgcagcgacaaatgcaccgccgcctgcagcgccgactcgcggatcttgacgctgtggtgctgcgcaaaatgcggggcgatggcgcgcatcatgttcaccgcattctcttcgtcgggttcagaaaccaacacgtactggaaacggcgcgtcagcgcggcgtccggctcgatgaactgtttgtattccgaccaggtcgtcgccgccaccatgcgcagcgcccccctggccagcatcggtttcaacaggttgacggcgtcgccggtgccggcctgcccgccggcgcccaccagcgtatgcgcctcgtcgcaaaacaggatcaccggcaccgccgaatgcgcgatggcgtcgatcagcgctttcaggcgcgattcgaattcgcccctcatgctcgccccggcctgcatgcgccccagatccaaagacagcagccgggcgccctgcagcagcggcggcacctgcccctgggctatcttgcaggccagcgcttccgccaccgccgttttgccgaccccggcttcgcccaccaaaatcgggttgttctgccggcgacgcagcaagatgtcgatcacctggcgcagctccgcttcgcggccaatcaccgggtcgatttcaccgtcgcgcgcctggcgggtcagatcggcgcaccatttatcgagaatatcgaccgtctcggacgcctccggcgcatcgccgtgggcgctgtagacctcttcttcctcttcctcatgctcgacggactccgccagaatcgccggataatcgtcgaacagctgcgggatcggcagttttttgaactcgtcgctcagccggtacaggctgcgctgcaacgtgggatcctgcagaatgccgaccaggatatgaatggtgcgcaccccgccggacggcgtttcggcgagctggctcatcagcagccctctttccaccaccgtttccagttgcgtcgacagatccaccaccgcattcgtgcggttcggcaaggtatgaagaatgcgatccaacgcatcgctgatgcgctgactgttgatggcgtagtgcgccaggatcagcggcaggtcgccgcgctccttgtccaccaggactttcagccagtgttccagctccacgtattcgtgcctgaaggttcggcacagcttggtcgcttcgacgaacgactgataggcaaagtggcccaatcgcgaaaaaagacgttctcgttgatacaccttaaatttccttatattaagttgttgattgataaaccagctgcctaaacgtccctgtcttaggtttcagccagctgtctttactcagcgacttgccgcccagctgcgccgccatgcccggctccgtggcgatcagcaggctgacatccagcatcaactgatggctcgtaaagtcatgacagatgctcaccagcgcctgcagccgccggctgccgcgctgatactgctgatactgcggggcccccagcgggccgatctgaatatgcgcgccgtactgggcatcgaaaaagcggctgccgatgcgcgtgctgcccaacttgcccagcttttggctgccgctttgcttgccgtcgtcgatccacttggcgtagcgcggcgtaatcgtgatgggaacggcgaaataggccgccaacatcttgttgagctgccgcagcgagcggcgaccgggcagataagtgccggggtacgcctcgcgcaggcgctggatatgcgggttcaccgtcagcgccgtatcgacgcccaccgtctggcgcaaatggcgcaagaacgggtttttgtcatcgtcatgctcatggccgatcatcgccttcagctgcgcccaggcccggtagtgcaatacggcgaagcgctggctgacgatgccgacgaactgctggaacgcctggttgcgtctggcgatgacttcggtgcgcgcgtgctcggtcacatggatcggcagcgggccgtagggggcgaacatgccgaaatgccgcgcctggatcagcacttgcttagggcgctgcacgatagaggcgatttcacgcgaagcgaacgccatatccgccggctgggtaatgcagagcctttcgcggctgcgatcgttggagacgccgagccgcggcgcatccggctgcgcgcgttcgatacgccgcagcagctcgaaaaaatcctgtcgattggacagcccgcggatttcggcctggcccgcgctttcgctttgcgcccccggcgtcggcgcctgttccaacgagagcgccgtttcacgcatcaacgacatatcagccatagtagagcgccccccagtcggcgtgggtttccccatccagcaacagcttcatgcttaacgtttggttcaggtcgccgtattggctcaacgcgtggtgcaatattttgccgaacagataggcgccgtggtcggcatgatggttggcgcttaagttgacggcgatctcggctccgcggatccaggccagcggccccggcccctgattgcgttcgaagtggtgctccacccaggcatttttgatgctggcgatgcgcttgcgctggctggagtcatcctgatggcagaacaacgacagccagtcgcgcaacagcgccgaacaatcctgaacgtcggggcgcgcatggcgcagaggattggaggccagcatctgaatcgcctgccacgcctggctgatgttcggcaccgcgaccgggttgctcgggtagcggacgatctccacctggtggatcggcatcgccgtttccagctggaaatgcggctgctgaaggtgcgccggcaccagatgccgttcgcagaccagcgcctcgacgctgagcgacgtgatgtcgtcgatgtcgatgccgcttttgcccggcgagatggcgatgaaggtatcttcgttgggcaggtgcggattgttgtacttggagggcgacggctcccggcgacggtgcagcgtataaccggccggctcccgctcgcagtcgtactgcacgtcggcctgcagcgaagagaaaatcaccgggttgccgtcgggcagcatgcctttcacctgttttacgctgtgtatctcatacagcgaggtgttcaaacgatcgaccaccagctggtgctccgtgcgctcatccgtcagcagcaccggcgagcaatggcggcgatacaggttgatgaccggggtcgcgaaaagatgaaaatccctggcgttgacgcgaccgatcagagtgagtgggcgttgctccagcgcgaacaagatctcgaactcgtgaacgcgttcacattggcgcagaaaatcctgcacgccatgcaactccaggctgaagaagcggcttggcgcggcgaagtattcacgcatcagccggttgccgggcaattcccccaccacggtgggcaacaaggcttcttcatcgctgacgccgcccaggcgcaagctgcccggcggcaagactttgacgattggccggtcgtcgcttttcgcccatagcacgatgcgcaaggtgcgattaagcaacgcggccagcagttgattggcccgcaccgtatcttccgccagcgtcaggtgcagcggctcgagatccagctccgagacgggaagcacgccgtgcgtcgtcaggcatatcctgacgtaggccgagcaatcctgcatgtgtctggcggcgccgtcaggcaaatggtgcggcggcaaaatctcgcattccgccagtgaaatctcaacgggctgcactttaatatgccgcgccgtggtgaacgtggcgggtttgttgttcagcgagatatcgttgagggtcatgcggctcccgcgcggcaggtcaacctggctgtgccactggggaaaagagagatcgggcttaatcgcgacggtggcgattgcgggaaccggcgtataccacagcggcgccaggcgtgagagcatttgcaaggcaaattccggctgctcattgttcagcttttcctggatgcgggtgcaaaggaacgcggagccctccaacagacgctcaacgaaaggatccagcacgccgtcgatatgcatgcctaaatgctgggcgacctggggatgagaagaggcgaactgacgaccggcctcgcgaaaataacgcagctcatcattatataattggagaaagcgctcactgaacatagtcacccctattaatcaaatacgtgtacggcgccacaggaataatcaagagcgatgcgcaaattaaccagcatttcgtcacccggtaatgagcaggtgccataaatatcgaataaaatcgccagcacatacgattggcgttcattcactacaggcaccacacgaatcgttttcggatccagacgcggctcaaacgaagtaatgattctttgtatatgtctcgccagcgttaacggatcggtattaatcggtatgcgttggctcagcgacggcaggccataattcaataccgaactttcgctgtgcgcataatcatgaagtttcaaatcagcgctgcgcgatgcgtcattcagtaaaaattcgatatcacgcaccaaaacacgccgccaattatcggcgctggcgctttgatgtctcacgctgagcttatcgaatagcatgggcaatgacgctttcatttaacacctcgcgataaggcttatgtctgcccgcaatcgctgcgggcagacagcctgcaattagtgttgtgacatcaatgatcagatacgggcattaagcttgaggtcataccccgtcttaattaccgcacccatggagccatcattgttttgctctttgtactcaacttcgatacgtgcgaaattcagcttgataacgtcggttggcagcacggtatcgatttcagtaccgatggtggaattcagcggcatattacccacggtcttgaatgaggaaaccaggcagttgctgaaggtcacggcaatgaagtcttgctgaccctggcctgatttacggcaaacaagttttgcctgaggaatatgctcgccggtggcgcacatcaggaacagtttcggcgaagccttgttgctcaccatgcgaaactcaaagtctttcatctcgactttgcctgaaccgccgccgctcccgaacccccaacggccggcgttttcttccgcccattgccaggcttgcagctgaatccagccagggtaggtttggtcgggtgattcaccatcaacaccctcaattttcaaaaaatagtctactaaagctttcgtgctcattttttgtctccttgactgataggtctacttcgttaattgaaaagtctattcagataagtcgttatattgcctacgcgatcattgaaatagcgacaatgagaacccattagccattaataaatagcaatagcgtaaaaaacagcgccactaaatttcaatgaaatatcaattcccaccaacgccatttaataattaacgtcggcaatatccaaaccaatgaccagccgtaacttatctgctcccatcttttttggctgacggaagttttgatacaagtcgcaaggacacggtcatgccttccaactggtaatgcgggcgcaaatagaaatgcgcgcggtaataacccggatcgtcttccacatcctcaacgcgcacctcggcggcggctaatggacgacgcgccttggtcgcctcggtcgatacggaaggatcgccatcgacgtagttcatcagccagtcattcagccacagctgcatatcgtctctggaacggaaagaaccgattttgtcgcgcacgatgcatttcaaatagtgcgcgaatcggcacgtggcgaaaatataaggcaagcgcgaagacagcttggcgttggccgtcgcgtcgggatcctcgtatttcgccggcgcgtgcatggtgcaagaaccgataaaagcggcgaaatcggaatgcttgcgatagaccaggggcaagaacccggcgtcggaaagctcttgctcgcgccgatcggaaatggccacttccgtcgggcacgtcagttcatatccgccctcatcggaaggaaacgcgtaggcgggcagttcttccaccgagccgccggattcgatgccgcgaatcttcgaacaccagccgtactcatggaacgcgcggttgatgttgacgcccatcgcatacgccgagttggcccaggaaaaatcatcatccacatccggcctgacggactcctcgaaagcgaactcttcgatcgggttggttttcgccccgtaaggcaaacgcgacaggaaacgcggcatcgtcaacaccaggtaacgcgagtcgttgctttcgcgcaggcggcgccaggacgcatattccggcgtggtgaaaatcttgccgatatcccgcgggttgcccagttcgttccacttgctcatctgcagcagcgacggcgacgcggcggaaatgaacgggcagtgcgacgccgcggaaattttcgccaactcggtcagcagcgtgacgctcatcgggctgtgatcgaattcaaaatcgccgatgatgcaaccgaacggctcgccgccgaactgaccatattcctgttcgtaaatctgtttgaacaccgggctttgatcccaggcggagccccgatagcggcgcaaattgcgcgtcagctcatcctgactgatgttcaacacccggatcttgagcgtttcgctgacgttggtgttatcgaccagataactcagaccttgccaggcggactccagcttctggaactccttgtggtgcaagatattgttcatctgttgcgaaagctgttcgtcgatctgggcaatcaacgattcaatggtcaatacgacatcctggctgaccttgaccttgcctttgttggcatattcggacagcgtgccgatagcccgacgaaccgcttccgaagcctcgttcgttctgggccggaatgaacgcttgagcaaaccgtcaagctcattttccgtgtcctgcgtttcaacttcagcgactgccgtagcctgctgcttagccgaatagcgtcgttgcctcgctctcattcctcatctcctttattgccgggatcctgcacatcctgttccgcatccgcgaccgttttacgcgcatccgtcaccaaacgatgcagaaaatcgggtttctccagcagattcttcaccacttcttccgcgctggatttaccatccatataggtgatcagctccgtgagatgctcccgggcttcaagcaggcgttgcatctgcggaacccgtttggcgatggcgccaggcgtgaagtcatccatcgattcaaactccaattccacgtccagcaacgcatcgtcttcgctcagggtgttctctacgtaaaattgcagacgaggcttgatggcgcgcatgcgatcgttgaagttgtcctgatcaaaggtcaggaatttccgctcttcgatcggcagcaaaggctttttccgatgcccagagagatcggacatgacccccgtaacaaagggcaactccactttcttttgtgaaccgtaaagctctacgtcatattcaatttgcacgcgcggcgcgttatttttaccgataaatttctgagagcttgagtccttagccattggaaaactcctttgtgataaaaattacttcccggacaattgatttaacgaggccagagattccggcaaaagctcctcaacaatcgtcgcgaagtccataccgatcattttttgtgaacgtcgaataagaatgggggccggatggctgggctcatagttttggaaatagtccaaaacctgatccaacagcaagatgacatcctgccgggaacggatatatttgccgggcatggcgacaggcgcgtcagcatccggcgagtcaatctccgcgtcatcccgttcagccggcaattcctgctgttccagtgaagccagctggcggctgaactgtttcaaatagtcgcgtacctgccggcagtccaaacgataatcttcagcctgcagattggcgtaattctcgacgcgctccagcgcatcgatttccagcgccaattgctctttcagcgaaggcagatttctgccggcaaaataactgtcggcttgccccagcacctttaccacctctgaaaaatgcaggcttttgccttcctgctcgtcaagccgcatattcagcagctcgtcggtggttaacggcgtgtcgggaaaaatcttgctgttcttgatttcgtgcagacaggacgatgtggcgagccaccctaatgcggccgcatgaaagctgtccgatgagggttccatgtccgcctgagggaaaatggtggcgccctcctcggcatatttggcgtcaatatccttaatgccctggtagaaggccgaaaaaccgtcgatatgaagattggcgcgcataaaccacagcacgacatgtaaatcgaagcactgttccagcaacgcggcagactgctcgcgaatggcgtgccaattaatatcacgcgcattgtctacggcattaagcggatcggtttgactgtcatattccgaaagcgtgaattcaatttcactgtatcgtggatcaaattcgacgccattcacttccgttgagatgacttcattcatggcctgatatccttttcaatcagcactagaaacataaagcctaataaagcgggcttttacgttcgccagtctttcccagagtccttttagcgtaagttagtcgtcaccaagctcgcaaattgtttagatgtattaatattaacaacaataatagattgaacctatcaatagaatcacagtgatcggtttaaactattttacatttacatatttattttttccttttaaaatcaataaattgcaaacaataattatgcaagctaagaataggaaaaaaatcaaaaactgccctaaaaacaacgttccatccttggtaggataattccagtaataccactggatacaaataatttaattagcaaatgataaccacagtaaatagtgaaattttttcataaaaccatgacagccagtcgtttcttgcaagcgggtagcacgcaatgatcaatagaagacgatggcagtgtgactttcatttccagcactcagtacttacacatgcgaaacctggtgtgaaaataaacaatttggcgagagttttgattattaattttaaagctaaagcacagattaacattccgccgtggtgcaccgaatacctattggtacacaaacagcctggtggataaagcatcattcttttatagttaactcagggtaatgatcagaataatttaagattcaattccccttcgtgtgtgttctcatacggcttaccgcggcaaaagcatcactgcggtaaagagtctcgcagactaaagtggcattagagatatcatttactataacggcaaaataaccacgtaagcgctgcaacgacaggaaccgtgttaagaccagcgatctgttccatatacaagaaatgtttccctaactgataagaccactaatttgatactagcaaaggcaaacccaatatcaagaaaaaatattatttttttaataaaaaaataacaaatcaatatacataaaacaaacaattcaataacttaaaacagtgctgaatcgattacttttacgccaggaaaaatagttcatggaaatttgccccccctcacaaccccctcagtcaatctccctcattctcttcggcattgaattgtcatcaaaaaataagaaaatctataaaaataaaacccgccactggccgtacgccccacaggatcaactttcgcaagacaaaataagcaagataattcccaataaaaaggccgaaaaaaagcgttaatgatttagcggttcaaaataaaaataaaggtaactctattgggttattaaagcgaaaacgcgcaccttttcattgctgcaaaaaaaccttatgaatctttacgttgcctgtcctttgacaatccttaatgaaaacgcaaatcgggtagccaacacatacagaaaagagatgggctacacggcgggccacctctgccgatgacttttctcatccccggttcggccggtgcgcacaggtcattccacctaaaaatcaggccgcaccgccggcctcgcccggctatttaacgccaagcccgccgttttcctgatccagaacagctttcgcattcatccgactgatatattgattgaaaatcattcctattcaggagaaaaagccatggttaagtcactcaatgcggcattcactcgcttttttgaccacccggacgccggcaaattggcgctcaggctaaccttcggtgggctgatgctgtttcacggcgtggcgaagattcagcacggcgtcggctggatcgccggggcgttgcaggaacaggggctacccgccttcatcgcctacggcgtgtatgtgggggagatcctggcgccgatactgatcattttggggctgttcacccgccccgccgcgctggtttacgcctttacgctggtggtggcgtttttgatggtgggcaccggcaaggtcttcaccgtcaccgacgtcggcgcctggggcattgaaaacgagctggtgttctttatgggcggactcgccatcctgctgctgggcagcgggaagtatgccatcgcgcggaatgaagcctatcggtaagcggtagcattaataaggaggttcttggtttaaacctccgctgtgcggaagcggcgtttaacgatcggccaaccggtataccggaacctggcgcgtcgtgccggtcagggtgtcgaaaatctccgtttccgccgtcacgatcgtcatgccggtttttcttagcctacgcacttctgcggcgatgcgctgtatgccgaaccagaacagtccgtccagcgccgtgacgcgcagcccctgctccagcgccagcttaagccgctcacgcggcgccttgagcgctttggcgatttcccggtaaggcagcgcgtccacgcccgacgccgaagttcggtgaatacgggtcgacaggccatattggaaggcctcaggcacgtcgcttaaatcgcttttcaggctgtaaacgcagccaaagcgcttgccgttgaacaccacatttttttgactgatcgacagctcatcgcgcaggccggcaatcagctgcggcgcccgcaccagcaataagcgaaacggcaattcgaaactggtcacatagtccacgttgagcagcgcaatgcgcagacgctgttccgccccggcctgcgtctggcgacactcgttcaacacctcgctccactggcgcgcgagccgcggggcttcatccagcggcgcgaagtggtatttctcgatgtggtagtcgatcctttcattcatgtccgttggcccctgcctcagtcatcatgccctcagcaaattaccttacccgcgggcaacagtacaacaccgcgatgaggtcactcgggaaatacggcgctggctttcgtcggaacggactacgcgggctcgatgaacagcatcatgcgttgcagtgcgtcatccagggcactgagcccggcatcatccagacaggccatcagctgtgcgtcataatccgccacccattgcctcgcctggtcaaaaatgggacgagacgccggcatgacacgcagatataccgcgcgcttatcttccggatcggggaagcgcgcgacccacccccgattgaccagttgggtgatcgtacggcctagcgcggtgcgatcggtctgcgaatgcgctatcacctcgctcatggccacgtcgcccggaaaactgtagagaatgcgcaacgcgcgccactcatggaggctgagtccttgcaaagcgagtaacgcagacagccgtttttcgcggtgacgcaccacctccgtcatcctgtaaagcgcaccattgggcaatcccattccccgtctgccactctgcgtgccttttttttcagaatccatactgtttccaattagcctcgacttttgccctgacctgttccggataagagtgcctgaaagaggcggtacccgcacgtgttacgccgctgaactgctcggggaacaggcagttgatgatggctttgccgccgctaccgcgcgccttgtcttcttccgtcaggtacggcaccatcgggaactcgcgtacgtccgggaagataaaatggtcgcgcgccggatgtgaacgcgtggccaacgcccaaaccacctgatcgatatcgacaatatcaatgtcattgccgaccaggatcagtttggggatcaggtagcccgcatgcgagccgaagaccacttccgccaccttgccggcaaaatccgccgcggtggtattcattccggccagtttttcgatatcgacggagaccaccgcccaacaggtcgccgcctcataggaacaccagacaaagtcaacgggcaaggccgcgctctgcagggtttccagcagctgagccgagatcatggtgccccagatcgtatgattttcttccggcggcgtgccggcgacgcaaatcggcaaaatggggtcatcgcgaaacgtcacagcacgcacatgaaacaccggctgttcatggccttgctggtgttgatagccgtgatactcccccatcggcccctccagcgccgtctccgtcaggctgatttcaccttccagcacaatttccgcattggccggcacccagagatcgttggtttccgcttgggtgagcgtaacgcttttaccgagcagcgcgccgacatagtcaggctcactgacgccggccggcaacggcatccccgcgaccgccaccgcggcaggcggcgccccgagcaccatcgcccacggcgtaggtttcccttctcggcgccacatttcacggatcatgccgatgtgttgggtgggtatcgccgggccggtgagacgattgcgatcgagcatcatgagcctgccgactccccagctatgccactttccgtccggggattgcacgacatggaacccgtaagtgccgaaatagcgcccgccatcccgttcatgcaacagcggtaccgggaagcgttccagatcaacctcgtcgccacgccaaatattctctttcaccgggccggtcgaacaataatccggcgcaaacggctccgccttcaccgcccggcgaatcgccgccacgatatcccgcggagcgctctccggcggcagcccaaaatggagggcgaggcgagaataggcatgttccgcagaagcgagcatgccggccggcgcgccaaggatgcgggctcccggcatcgcgcccgccacatgatgaaatagcggagccgaaagccgttgctcatagacccggcggcagacagccgctatctccaggtcggcggaaacttcctgatgcacgtcgaccaaatcgtttcggcgacgcaattcctcaatgaattgacgaaaatccagtgcgcaatcgagcaaactcatggcaagtcctccagtctccaggcggtcagccccttctgtcgccctcgtttcgggcaggagactgatcatttatgtgcatgtgcacacatattagtgcgcaaaaaatcgcgtgtaaatacactctatcctggaggcgttgggcatgttgtcagtctggcaaaattttcaagggatagcggactcagaccgtgcacgcccctgccggcaggcattatcgccgtgacggtttcacaccttcagcgtgattggcatgcatagcactgggcttgccgcaagcgccgcaccgggttcaagcgcaacgtggctcacaaaatgaagaacataatcgcaaaatgctattcgttgatattgcacgagttataatgcgggaaaggatctcggccaacgcaaaccggtttcatatccaacggtttacaagcattagcgaaagaaaaggattttgattcaatgggggaataacgcggggtaaagtggcggagagagggggatttgaacccccggtagagttgcccctactccagttttcgagactggtccgttcagccgctccggcatctctcctgacaacgcttgctatcatgcccgcttttgcggcatttttacagcattagcataccgctgaacgttcaagtgatgagtttacgagcaacctgatgattaaatggccgtggaaagcgactcaaccctctcaatcccaggcagacatcgaggcccagtggcaggacgcgctggcgatcccgctgctctcgccgctgaatgagcaggagcggcagcggctggtggccgtcgccgggcaaatattgcagcaaaagcgcatcgtgccgctgcaggggctgcagctcacctcgcaaatgcaggcgcgcatcgccctgctgttcgccttgccggtgctggagctgggcgcagaatgcctcgacggcttcaacgaaattctgctctaccccaccccgttcgtggtggaagacgaatggcaggacgagatcggtctggtgcactcggggccggtggtgcagtcgggccaaagctgggaacaggggccgatcgtgctcaactggcaagacgtgcaggactcttttgacctctccggtttcaatctggtgatccacgaagcggtgcacaaactggatatgcgcaacggcggcgtcgccaccggcgtgccgccgatcccgctgcgcgaggtggccgcctgggaacatgatctgcacgccgcgatggaaagcctgcaggacgagatcgacatggtcggcgaagaggccgccagcatggatgcctacgccgccaccgatgcggccgagtgcttcgccgtgctgtcggagtatttcttcagcgctcccgaactgctggccgaacgcttcccggcgctgtatcagcacttttgccgcttctaccgccaggatccgctggcgcgcctgctgcgagaccaggcggaaaacgacgcgcaatgggctgattgacgggcgcattgctcagataccgagcagtcgcaccgcctggggcaatttagcgttgacacacccggagccgctggatatgatgcgccccgttcacacgattcctctgtagttcagtcggtagaacggcggactgttaatccgtatgtcactggttcgagtccagtcagaggagccatatttagagaagcccgcttaaggaaacttaagcgggctttttgctgttgggcgtttagagcccgcgttgttccatcagcagcgccagatcgaccaagcggttggagaagccccactcgttgtcataccaggcgagcactttcaccaggttgccgccgatcaccagcgtggacaggccgtcgatgatcgacgaacgcgcatcgccccgatagtcgctcgacaccagcggttcatcgctgtaccccaggatccctttcagcgggccggacgccgccgccgcgcggaaagcggcgttgatctcctccaccgtcgccgggcgtttcagcgtcaccgtcagatcgacgatggaaaccaccggcaccggcacccgcagcgaataaccggtcaggcggccgtccagttcggggatcaccttgccgagcgccttggccgcgccgctggaataaggcacgatcgattccgccgccgcccgcgcgccgcgcagatctttttccggctgatcgtgcagcgcctggctgttggtataggcatgcgtggtattcatcaagccgtattcgatgccaaacgcctgatgcaatacctgcgcggcgggcgccagcccgttggtggtgcagctgccgttgctgaccaccttatgcagcgccggatcgtaaagctggtcgttaacccccatgacgatggtgatgtcgtcgttcttggccggcgccgagataatcacccgcttggcgccgccgtgcgtgatgtgcacttccgccttggctttatcggtaaagaagcccgtcgcttcgataaccacgtccacgcccacgctgctccaggggatctcggcgggatcgcgctgtgaaaacacctgaatcggccggccgtccagcagcagctggttgtcgccggcttccaccctggccgccagcgtgccggaaagcgtgtcgtatttcagcaggtgcgccagcgtcttgctgtcggtcagatcgttgatcgccaccacttcaaaatcgctgcgccccagcgccgcgcgcagcacgttgcgcccgatcctgccgaagccgttaatgcctactctcaccatgatgcactcctcatttgtggactttgcctaaaatctagcgccgaccagaagcggcgtaaatgacgtttaccaatcaatttacgccaaattgcgcgcatgaaagcgttcgcggtattcgctcggggtcagctgcagtttgcgctcaaacacccgccgcaggttaaggccgttgccgaagccggtggccagggcaatctgctcgataccttccgcgctctgttcgaggcgctgcctggcggtatgcaaccgcccctcttcaacgaatttggcgggagaaatgcccgtctcgcgggtgaacacccgggtaaagttgcgcgggctcatcgccacgcgctcggccaaccgatcgacgctgagatcgtcggcgaggttttccaggatccaggattgcaggtcacggatcggccccggcgatttggcctggttgagcggatagcggctgaactgcgcctgcccgccggggcggcgcagaaacatcaccaggtcctgtgccacttcgcgcgcctgcacgaagccgtagtcgtcctccaccagcgccagcgtcagatcgaagccggagctgacgccgccggaggtccagatcggcccgtcctgcacgtagattgggccgttttcgacctgcacccgcgggaagcgcgcctgcagcgtttccgccagccgccagtgggtggtcgcccgccgcccgtccagcaacccggcttcggccagcagcagtgcgccaccgcaaacggaagcgatacggcgcgcctgcggcgccgcgcggcgcagccaatcggcgaccagagcaccctcttcttcggtcgcccccttgccggcgacgatcacggtatcgcgcggcagggccggatcgagatccgccaggcgatgatcggccaacaggctcagcccggacaggccgtgcaccacccggtgagattgcgtggtggcgaccgcgatctgatacagcggcgtctcggcagggctcaggcgattggcctgcatcaggatatcggcgatgcccgccgcttcgaacagcatgcccccttcagggacgataatcaggaatgagtgcatggcaataatataaataacaatcaaaacaggccaggcgaccactgtataagaaaagccccgtcggttcaccctgcgggtataaaaaagcccgccgataatcatcgacgggccaggaaggaacggccatcaagcctgcggcaggttcaccccgccggcgcgcgccaattgcgccagcagcgccgtttgaaacgcctcatcgtgcaccgccgcgtgaggttcaaaccgctgctggtggtgccaatagccgccggacgccagtgcctgcggttcatcgctgctcaccagccacgcctgcgtcacgtgtcccagcgccagatcgtcgggcgcatccgcgccgcccattttggtcggcacccagccgggatcgaccgcgctgctgatgacgccgggccacaggcgcgccacggcggcggccagcgcggtgacgaacagcttgctgtccgaataggagccggctgcgccgccaagccagtccacgccgttcagttccgctacgccgtcaaagtgcatgctgctgctcaggtagacgatgcgatcggggcgttcgatcagggccgtcagcagatagggcgccatcacgttcaccggcatcacctgcggcccggtgaacatgccggcgttgtggatcaccgcattcgggcggccaagacgattcacctgctcggcgacctgccggatctgctgcacctcggacagatcgccaatcaccgcctgcgcgccatgatccagcagatcgcgcaccgcctccagacggccgggggcgcgcgcatgcaggatcacctgatgcccttccgccaacagcgtttgcgcggcggcgcggcccagcccgtcgaccgaaccggtaatgaaaatgcgtgacatgccactcctccgtttagcgccagccgagcgccggcgcgacatgggttaaaatcgattcgataacgtgggcgttataatccacgcccagctggttaggcacggtcagcagcagcgtatccgcttcggcgatggcctcgtcctgcgccagctgctcgatcagcgcgtccggctcagcggcatagctgcggccgaagatcgcccgggtctgcgcgtcgatataccccagctgatcgccctctttgccgctgccgccgaagtaattgcgatcccgctgatccaccagcgcaaagatgctgcggctcacggaaacccgcggctcgcgcgcatggccggcctcttgccaggcggcgcgataggcgcggatctgcttggcctgctggatatggaagggttcgccggtctcgtcattcttgagcgtcgagctttgcaggttcatgcccagcttcgccgcccagacggcggtggcgttcgaaccggcgccccaccagatgcggtcgcgcagcccggcggaaaacggctccggccgcagcagcccgggcggattggggaacatcggctgcggattgggttcagcgaacccttcgccgcgcagcgcttccaggaacacttcggtatggcggcgggccatgtcagcgtcggtttcgccctcggccggggcgtaaccgaaatagcgccagccgtcgatcacctgctccggcgagccgcggctgatgccgagctgcagccgcccgccggcaatcagatccgccgcgccggcgtcctccaccatgtacagcggattttcatagcgcatgtcgatcacgccagtgccgatctcgatacgttgggttttggcgccgatggcggccagcagcgggaacggcgatcccagctgacgcgcgaagtggtgcacgcgaaaataggcgccgtccgcccccagatcttcggcggcaaccgccagatcgatggactgcagcagcgcatccgctgcggaacgggtgccggactgggcggaaggcgtccagtggccaaacgagagaaaaccaatctttttcatcgggcatcgtcctcaaaggcaaaatcatcggcctacagtgacaaaaaccgcgcgccttgcgccagcaaaatcgcccccgatcgcactaaacgaaccgattgccgccgcgccgcccggcgattgtaatcaaaaaacaaatgtcgtataacaggcagctccgaggggtgtcctgttacgggctgagatggcgcaagccgaaccctttgaacctgatctgggtcatgccagcgaagggacggttaggcaacaacgcgattacccgttgcctgttcatacctcagcgtgcccggatctccactgactcaaggaggtcccatgtccatcaccaccctgttcgaaagcggtctttacggccggttgcgccaccatgccggcagccactggcaggactacgtcgatcacccgtttctgcagcagctggccgccggcaccttgcctgaacgcgcttttcgccgctacctgacccaggactatctgttcctgctgcacttcgcccgcgcctacgcgctgctggtcagtaagctgcgcaccctgccggagatgcgcgccgccaccgcctcgctcaacggcatcgtcgccgagctgccgctgcacgtggcctactgcgccgaatgggggttgagcgaagcgcagatcgccgcccagccggaggcggcggaaaccatgaactatacccgctacgtgctggacatcggccatgccggcgacgccctcgatctgttggccggtctgctgccctgcgtggccggctatgccgaaatcggcctgcggctgctgcacgatcccgccacccagatggagggcaatccttacgcctcctggatccgcaactacggcgacgagggctatctggccggcgtacgcgccgccatcgaactgctggaaaccgttggtcagcagcgcggcgcacaggatcgcttcaccgagctggcgcagattttcaccaccgccacccagctggagtcggcattttggcagatggggctgaacgcctcatgaccaccccgcttctcccgcccggtatccaggtgcgggatctcagcctgcgtttcggtcagcacatcgtcttcgaccggctgagcttcgatatcgccggcggcagcttcgtcgccctgctcggcgccagcggcgccggcaaaaccagcctgctgaagatcatcgccggcctggcgcaggccagctctggttcggtgatcggcagcgacggcctgccgatcgccgggcgcatcgcctacatggggcaaaaagatctgctttacccgtggctgaccatcgaggagaacgtcgccctcggttcgcggctgcgcggcgaaacgccggatcgggcgtgggcggcgcacctgctggagcgcgtgggcctggccgcgcatggccgcagcctgccagcctcgctgtccggcggcatgcgccagcgcgccgccatcgcccgcacgctctacgaacgccagccgatcgtgctgatggacgaacccttttccgcgctggacgccattacccgcgccgagatccagagcctggccgccgagctgctggcgcaaaataccgtgctgttgatcacccacgatccgatggaagcctgccgcctgagccaccggctgctggtgctgtcgccctggccgctgggcctcgacgatactcatcgcatcagcgggctaccgccgcgcgcgccggatgacgccgacctgctgaaaagccaggccgagctactgcagcagctggtgagggcagcacaatgaatagtgcccaagagcgtggactcacccgcctgcggcgcgggctgacggtattcgtcggcctgctgctgctgtggtggctggcggcgcaaagcggcatcccggcctttctgctgcccacgccgggcgcagtggcgcaggcgctgtgggacgggcgcggctatctcgcctggcacacgctggtcaccgcttcggaaatcgtcagcgggctggttctgggcgtgttgctcggcgcggcgctggcgctgtgcatgattttctcgccgcgcctgcagcgctggctgatgccgctggtgctcaccagccaggcgataccggtgttcgccctggccccgctgctggtgctatggttcggcttcggcatgagcgccaaggtggcgatggcggtgctggtgatcttcttcccggtggtgtcggcctttttcgacgggctgcgccgggtcaacaacgactacctcgatctggcgcgcacgatgcgcgcttcgcgctgggcgcagctgcggcacgtgcggctgatggcggcgctgccggccttcggctccggcctgcgcatggccgccgccgtcgcgcccatcggcgccatcatcggcgaatgggtcggctcggccgaagggctgggctatgtgatgctgaacgccaatgcgcgcatgcagaccgacgtctgcttcgccgcactgtttattttggtgctgatgaccgtgctgctgtgggccgcggtggatgcgctgctgcggcgcctgatcgcctgggcgccggaaaacgactgatgattgcaaccataaccagggataaaggaacgaccatgatcaaacaaaccgtctgcgggctgttgctcggcgccgccatcaccggccaggccggcgcggccgacaagctgacgctggtgctcgactggtacatcaaccccgatcacgcgccgattatggtggccgagcagatcggcgccttcaaggccgcagggctggacgtcaagatcgtgccgccgtccgatccggcgctgccgccgcggctggtggccgccaaacaggccgacctcgccatcacctatcagccgcagctgcatttcttcgccgatcagggcctgccgctgatgcgcgtcggcacgctgatcaacacgccgctgaacacggtgatcgcgctggataaaaacatcacctcgccggcggatctcaaaggcaaaacggtgggttactcggtcagcggcatcgaacaggcgacgctggccaccatggtcgaacacgagcacctcaagccgcaggacatcaagctcatcaacgtcaacttccagctgaccagcgccctgctggcgggccaggtcgatgcggtgatcggcggctaccgcaacatcgaagcgctggagctgaagctgcagggtaaagaaccggtggtgttcaacgtcgaagattacggcgtgccggcctacgacgagctgatcatcgtcgccaaccgcgatgcggtgaacgagccgaaaatccgcaaattcctcgccgcgctgaagcaaggcagcgactacctgcacgcgcacccgcaggacacctggctggcgttcgccaaggcgcacccggagctgaataccgagctgaacaaacaggcgtggcaagccagcctgccgctgttcgcccgcgatccggccaagttggatcgcgcgcgctaccaggcatacgaacaatttctgttcgacaacaagctgatcaagaaagtcaccccggtagaccagtatgcggtggagctgaactgatcacgccgaggcggccggcggcgccaccgtcacctcgccctggccgctgcgctgcagggccgccttcaccagcccattggccttgcagcgttcgataaacgcgttcacataggcggcgccctgcgtgttttgccgcggcaccgccatcgcctggcggatggcggtaaaatgtccgtccagcactcggtagccgggatgggcggccgcggcggccaacagcggttgacgcacgccggccgccgcctccagcccccgttcgaaaaacagcgcgatcgcctcggcggaggttgccgcccgcaccaattgcgcctgctgcagcgtgcgcgataaaaacagatcgtacgccgccccctgcccgaccgcgatgcgcacctccggccggtcgagctgcgccacctcagagtaaggcgcgtcgttcgccaccagataagtcccctcaatgatcacgtagggttcgctgaaggcgatttgcgccgcgcgcaccggctcgatagccataaacgccaggttccaggcgccgctctccagatcggcgaacaccttgccggccgcgtcataggtcaccagctccagcgccacgcccagttcgcgagccagcgcggcggccagctccaccgaagcgccttgcggtttgccatcagccccggcctgcgccagcaccggattgccgtagttgatcgccgcgcgcaacacgccttgcggggccagatcgtcgagtaccgctgcggggattgtctgcatacttcctcctgaatggctgatggatgcaccgtcgtggcgctcattaagcgtagagcgaaacctccgaccagcaagctttcgccgccgcggccgccgtcggcgtgattaacgtcacactattgtcataaaaatgtacaatagccgccgctcgtcggccgtagcgggagatcgcacgttgttccgccgccggcaataggctatacccttcacttttcgcaccgcggcacgctcggcggcgcaaaccagggcagcaacggttttatttcaatcagacaaggtttggcggatggttttagcagtcgtttcgtttgttctctttttggcgtcgattttgatttatcgcacccgggccgccgccaaccgctggtggttcgccattctgctgacgctgctcggcagctatctggtgctgaacgtcatcctgatcgccagcaactacttcaccggcgacggcatcaccgatgcggtgatctacaccgtcaccagcagcctcaaaggcgcgggcatcagcaaatacgtgctgccgtttatcggcctgctggcggcgttggggcttatcttcgcggtgctagcccgcagcctgctgcgccgcaaggccaaaggcagcagcgtggcctacagcgtcgtcgccgtgctgctggcgctgttttcggtcggtaccaccccggcgtttcaggacatctcgctgctggtcaagagccagatcgtcggcgataccgccgatttcaccacctactacaaggcgccgaaaaagaccgtgcagggcaaacggccgaacctggtgtacatctatgccgagagcctggagcgcacctacttcgataccgagctgtttcccggcctggccgacgagctgaacgccctgcgcacggacagcatcgatttcagcaatacccagcaattgccgggcaccggctacaccatcgccggcatggtcgcctcgcagtgcggcattccgctgttcgcgcccttcgacggcaacgcctccagcgcggtctccaccttctacccggagaacgtctgcctgggcgacgtgctgaaggccgccggctacagcaactatttctatcagggcgccgagctggcgttcgccggtaaagacaccttcctgaaatcccacggcttcgaccacgtttacggcttcaaagagctgcgcgatcaggtcgccgatccgagctacaaaaatgactggggctggtacgacgacagcgtgctggacgtggtgtacggcaagttcgtcgagctgtccaaacagcgccagccgttctcgctgttcaccctgaccgtcgatacccatcacccggacggctttatctccgccggctgcagcaagaaaagctacgcctggcagaacaaggaaaaccgctcgctgagcgcggtagcctgcagccagcaacacatcgccgcgctgatcgacaagatcaaacgctcgccctatttcagcaataccgtgatcgtggtgtcctccgatcatctggcgatgaacaacaccgcctacgatatcctgaccaaacagaagcgccgcaacctgttcttcatcatcgacggcacccggccgctggcggaacagcgcaacgagaagcgcagcacgctggacaacggcgccacggtgctggacgtgatgggcggcgacaactacatcggccttggccgcagcagcctgtcggcgccgtcgctgtctacggtgttcctgaatatcgaagagaagatcaacggctggaaaccggcggtgatcaatcagtggggcctgccgaaccgcatcagcgactacagcgtggatacgcgccaacgcagcttcagcttctccggcgtcacctacaaggtgccgttcatcctgcgggtgggcgacaaccgcatcgaaccgatgttcaacgtctacctctccaccccgctgcgcatgcagctggccgggctgggggcgggggagaaattcgtctgggtcgataaatgctacgagatcggccgggtctgggcgccgcagctggcgctgagcaccgacatctgcgtggcctcgggcaccctggcctcgccgccgcagatcgcgcaggccagcggcgaacgcttcaacggcaaggtgaacttcaccggcccggcggcggacagcgtcgccgattatcaaaacgccgtcgcccgcctgcaggtggacgacgcggcggtgaaataccgggcggacaccatcgagttcatgctgcccggcatgccggaacaggtgaaagccatcaccggcgtctccgccgtcgaggaatggggccgctggtccgacgccaatctggcgccggcggtcgacatcgattacgtcgatccgctgccgaagcgcttcgatctggtgctgcgcgcccgcgcctacggcaacaacgtcggcgaaccgatttcggtgcgcgtcggcgacgaagagcgcttcgtgtcgctcggtgaacaggacagcaccgtcaccctgcgcttcgacaacccgcgcggcgcgcagaagatcagcattactccgccggcgccgaccgagccgaaagagagcgccagcggcggcttcacgccgaagaagttgggcatcggcctggtgtcgctgaaggtcgaagcgggcgctcccgcctcctgatcccccgccttcacgggcgcggtattttctttgccgcgcccgtcatttcgaccaagcttttacgcccttcttcggctaacctgtgacggtaaaacgccgcaaccccgccacagagccgggacatccaaggagaaagtatgagctatgccccacctcgcagcggcctcagcgccgatcaggcactcgatcaactggaagccctgtatgacgccgcggtagacgcgctgcggcaggcggtcagtgactttatcagccacggcacgctgccggatgcacaagcgcgcgccgccgggctgttcgtgtatcccgaactgcgcgtcagctgggacgggcagcaatccggcccgagcaaaacccgcgccttcggccgctttacccatcccggcagctacagcaccaccgtgacccggccgcagctgttccgccactatctggccgaacagctggcgatgctggaacacgattacgccgcccatatcgaagtggcgccgtcgcagcaggagatcccgttcccttatgtcatcgacggttccagcctggcgctcgatcgctcaatgagcgccggcatcgcgcagcatttccccaccaccgagctggcgcagatcggtgacgagaccgccgacggcctgtaccacgccaccgacaaccatttcccgctgtcgcatttcgatgcgctgcgcgcggatttctcgctggcgcgtctgcggcactacaccggcacgccggtggaacattttcaaccgttcgtgctgttcaccaactacacccgctatgtggacgagttcgtgcgctgggcctgcgcccagatcgccgatccggccagcccgtacatcgcgctctccagcgccggcggcacctacatcacgccggaaaccagcgccccggagcaggcggtgtccgatctggcgtggaaaaaccaccagatgccggcctatcacctgatctcgcgcaccggccagggcatcacgctgatcaacatcggcgtcggcccatccaacgccaagaccatctgcgatcacctggcggtgctgcgcccgagcgcctggctgatgatcggccactgcggcggcctgcgcgaaagccagaagatcggcgattacgtgctggcccacgcctatctgcgcgacgatcacgtgctggatgcggtgctgccgccggatatcccgatcccgagcatcgccgaggtgcagcgcgccctgtatgacgccaccaagatggtcagcggcatgcccggtgaagaggtcaaacagcgtttgcgcaccggcaccgtcgtcaccaccgacgatcgcaactgggagctgcgctactccgcttcggcgcgccgcttcaacctcagccgcgcggtggcggtcgacatggagagcgccaccatcgccgctcagggttatcgcttccgggtgccgtacggcacgctgctgtgcgtctccgacaaaccgctgcacggcgagatcaaactgccgggccaggccaaccgcttctacgaaggggcgatctccgagcacctgcagatcggcatctgcgccatcgatttgttgcgcgccgagggcgatcgcctgcactcgcgcaagctgcgcaccttcaacgaaccgccgttccgctaacggtgctcaggcccgctgcggcgggccgttttttcctcaacgcaccagcgccagcgcgcgcttctcctggctgcggccgccggcgatcgacagcaacaggtctttcaccagcagcgccggggcggacagcccctgttggctggacatgcacagtgacagcggcaccgacatcgtcggcgcattgatgcgcgccatccaggccttggccgggccgatcatcgcgcgcgccaccgattccggcagcacggtcgcccccaacccgctggcgatcgcggcgctcagcgcgcccgaggattcgatctcccccaccacgttggcagccagcttgcgcagcgccatcgcctcctccagctggttgcgcaccgcatcgccctcgcgcggcaggaacaggttcagccgcgccacgtccagcagctcgacgctgttgccgggatgcggcaccgcgcgcgtcgccaccagataaagatcttcccgcatcaatgcgatggcgtgcagaccggcgggcattttggcgccgtagaccatcgccatgtccagcgtctggttagccacctgcccggccaacgccgcgccgccgttttcatgcaggctgagcaggatgcccggctgctgatcgcgcagggtctgcaacagcggcagcgccagctgcgccgcagtgctgcccgacgccagcccgagagacacctggccgctcatcgcctgcccggcgctgttgaccgcgctctgcgcctgttcgcactggcgcagaatggtctgcgcgtgggcatacagaatgttgccggcctcggtcggctgcaccccgcgcttggtgcggatcagcagctgctgcttcagctccccttccagcgtcgccaactgctggctgagcgccggttgggcgatgtgcaacacctccgctgcctgggtcaggctgccgatatcgacgattttcacgaagtacttcagacgtctgaaattcatagtgcctccagcgagccgctaaattgagaatgccgaaatccggtcatgcaatcacagcaagatccaggccagagtcggtaaacggccgtggaagcggggtacaaggcggtaaatggccgttcgccgggcggcgcgcgccaccgcgcagggcaaccgttgcaccatcggcaggcaaatgcgccacacaacgggcaattcgacggcgctgcgcgcgggataagcgacaaaagcgagaaaaagcagcaggttgggcaatcttgcagcaaacgaacgcatcgggcgttttcacgctttacaagccgcaaccgccccgctattattcgccccgttccaacgattcctctgtagttcagtcggtagaacggcggactgttaatccgtatgtcactggttcgagtccagtcagaggagccaaatttagagaagcccgctcagggaaacccgagcgggctttttgcctttcagccgccgtcaaaagctgcgtttcgccaccagataggcgcccgccaccagcaataaggcgccgaccagcgccggcagattctcacgcagcgccgccggaccggcgcgataggcatcggccaacagccccatgcacagctggctggcgaccaggatcgaaatggtggccgccgcccccagcttctggtaacccagaatgccggcgaacacgaacagcgatcccaacagccccggcaacagcatccaccacctggcggcgccggtcacttccgccaccgcgccgaggccgtttttggccagcagcaaccccaccagcaacaacaaaccgacgctggagttgatcaccagcgtaatgaggatggtcgaaacgctttcggtaatgcgcaccatcagcagattctgcaccaccagccccattcccgccgcgatcagcagtaacagcatattcatcgccctgtctcccgggatcagcgcgcgggcggcgtcgcccgctcgtcgagcctcagctgcaggaaggtcagatccagccattggccgaatttggcgcccacttgttccatgcgccccacgtcgcgaaaccccagcgccagatgcagcttaatcgaggcctgattgccggattcgatgccggccaccatcacgtgcttgccgatttcccgcgcccgtgcgatcagcgccagcagcaacgacttgccaatccctgcgccacgatgcgcctgatggacatacaccgaatgttccacggtatggcgataaccatcccaggcgcgccagtcgccgaacgacgcgtagccgatcgcctcgtccgcggcgttcaccgccaccagcaccgggtagcccgccgcctgccgctcgccgatccacgccgcgcggttggccgcatccacggtttgttcattccagatggcggtgctgttcaacaccgcgtcgttatagatagcggcaatcgccgcgctatcgttgagcgtcgcatttcgtataatcatggtttacctcggccaattgtccactataatactacgatatgaatattaaattagacaatctaaatcagctgatcggcgcgcgcattcgcattgaacgcgaggcgcgccactggtcgctgtccgatttggccgaacgggcgggcgtatcgcgggcgatggtgcataagatcgaacgcggcgagagcagcccgacggcgatgctgttgggcagactggcgggggcgttcggcctcagcatgtccaagctgatcgcccgcgcggaaacgcaggaaggccggctgctgcgccgggaagatcaaccggtctgggtcgatccggagagcggctacgtgcggcgccacgtgtcgccgcgcaccgatctgccgctcgatctggtgcgcatcgaactgccggccggcgcagcgatcccgatgccggcttcggtgtatgccttcaagcgtcagctgatctgggttttatccggcgaactggtctttcttgagggcgacgcgcgccatgaaatggccgaaggcgactgcctggagctcggcccaccggcggactgccgctttgaaaaccaaagcgatgaggcatgcgtgtatatggtggcggtgctgagcgccgcctgacggctcaccggcgctaccccggcgtcggctggttatagccggcgtggaaaaacttctccgccaaccggctgtcgccgccggagaagaactcgctcatcggctcgcggccgaggccataggcgcggctgagctgcccagcctcgaacgccgcccggttctcgtcgccgcagcgctgcgccaaatggtgcgcataaccgagcacgaaaccgcgcttgtagtcggagcaaaagcgcgacagctccgcctccggcttcaggttctctacctttaaccccgccaacaaccctttgccaaaatgatctcccacgggttcctcctcaccgcacaatcgttatataacaaaatatacagcgaatgagcgaacgagaacatactccctaagttttactcgccgcataaaaaaggcccgccaagcgggcctgcgagaaagcgggcaatcacagcgtgaaattcagcccttcgctgacggtcttgccgagcggcagacggcccgacggcgcttctttctcctgcaggaaatccggcaggcgggctttgtcgcccggcttgccgatcgccaccatagcgtgcaccgcatagtcgtccggcagttgcaacgccgctttgatcttatcgtggtgaatgccgctcatgcagtgggtcagccagcctttcagatgcgcctgatgcgccaggttggcccaggccgcgccggtgtcgaacgcatgggtcgggttgtccaccaggcgctcgccgttcaggctggtggttttggagacgatcaccaccagcgccgaggcgtgttgcgcccagccgcggttgaagtcgatcaggaactccaggtagttctcccagctgtcggagccgtgcttgctgtaggcaaagcgccacggctgaatgttgtaggccgaaggcgaccagcgcgctgcttcaaagaagctcagcagcgtttgatcgtcgatggcgtcgttggtcatcgcgcgcggcgaccagcgctcgataaattgcgcgtcaatcgggtaatcggagattcttggctggctcatgataggttctcgcagtgaagtaaaaacaaaagttcgctgatattcccacagcttaggacggtaaaacttttatttcgtgccattgtcctgcggcaattcctgctgcaaccaggccagaaacgccctgaccggcggatgccgctcgcgccccggggcgcacagcacgctgtatgcggcgcccggtacgcgcacctccggccggtacgccaccagcagaccgttgtccaccatctcggacaccatcaccgagctggcgagcacccatccctgcccggccaccgccgcctgcagggcgtaatgctcctcgtgatagctgcgcatcgccgcatggcgctgccaccagtccacgccagcggcccggcaccagtcatgccagccgctgtcgtacagcgccgaatccccccacttgacggtgatcagcaccggattttccggcggagcggcggccagccccggcgcggcgtagacgccaaagctttcctccagccgcgccgcctgatgcagcgcgggatagtgcgcgcggctgtagcgcaccgccacatccacgctggcgtcctgctgcaggtcgatcacctcggcgcaggcctccaggcgcaccagatagtgcggatgcgcctggtagaaacgccccaggcgcggcaccagccacagcgccgcgaacgagtgcgtcaccgagacgcacagcgagccgctgctgggctgcggccgcaggccctcaagcgtggcggcgacatcaagcagcgcgccgtgcacgccggcaaacagcgtttcgcccttcgccgtcagccgcacgccgcgcggcacccgctcgaacagcgcaaaacccagctgctgttccagcgccttgatctggtgcgaaatcgccgtcggcgtcaccgccagctcggccgccgccagcttgaagctgcgcaggcgagcggcggattcaaaggtgcgtaacgcgttgacgggcagcgtagcgaacatggcgaagcctcttgggatgagttgagttcatcctggcagaaaaaccgtcatttgtcgcctgcagacgttcgcttctagattaaggctgagttcacttcacaccaaggagtatgacatgaatacagctcatcaatccaagcgcctggtggtgctgatcggcagcccgcgccgcgacggcaacagcgccacgctggcgcaggcgatcatggcgggcgccgccgaagccggcacttccgccagcctgcattttctcgacgattacctgagcggtttcctgagcgatgaacgccatacgccgccgccggccgatcgctacgccgagctgttcctggagcacttcctgccggccgacggcgcggtattttgcacgccgatttactggtacggcatgtcggcgcaaaccaaggcctttttcgatcgctcgttcagcttctattccaacgcctaccctcaggcggaacaggtgcaccaacgcatgagcggcaaacgcatcgggttggcggtggcgtcggaagaaacttatcccggcgcggcgctgggcatcgtgcatcagatccaggagttcagccgctacacccattccgccttcgtcggactggtgcacggcgccggcaaccagcgcggcgagatcgcccgcgatccgcgcaacccgctgcgggccgcccgcgagttggggcgcgagttcttcacccgcccctactcggattatcagatggacagcccgcgcagcacgcaggtttggacggaatagccacggcctcaaccgccactgccgatttgccagataaaggtcggcgtatggcggttaatttcccagtcaccgatattgcgcgccttgtagatcaccggattatgtgaagagagcgtgcgcgcattgcgccagtggcgatccaacgccttgccggtacgggtatccgaagcgccgagcgcattgaacaattcaccggcggcgcgctgcacccactccccggcgatgacctgcgccctggccgcgtccagctccgccgtcacgttaagcgcctgcagcagcgcttcatcgccggatcgatgcgcctcataagcctgctgcagcgaggaagtcgcttttagcaccgtcgcctcgaccgcataggcccaggcgctgatttgccccaccacctgctggatctgcacgtcgtccttcacccaaccggcgttgccgtggctatagatccttttacgttgcctcacgccctcgccgacgtctcgcagcaccgcgcggccgatccccgccagcgtcgccagcaacacatgctgatagaacgcagtttggtagcggaagcgctcggcaaagtcatagacgtgcgcctgctcgacctgcgcatcaataaaacgcgtggtgccgctgccggtagtgcgttggccaaatccgtcccagtcgtcgtcgcgctctacgcccggctgggcgacgttaaccaaagcgatcaccgggccaccgctgtcgctgcgctcggcatacacgtcgatccaatcggcaaacagactgccggtgctgtaaaatttctcgccgttgagcgaccagccgtcggcctgcggcgttacccgggtattgacctgccccagcttcacgccgccgatctcggtccaaccgctgccgaccagctcgccgtcgagaaagcgttcgaaccagcgatcgcgctccgggccgtccggcgcgttcagccgatcttccacgaaggcgaaatgcgcccgcagcgcctgcggcaggttagagtccgcctccgccagttcggccagcagttcgaacagctgcggcaacgaagcgccgtcgccgcccttttcacgcgggatgcgcaccctgccgaaccccgcctctttcagccaacggatcggttcatgcggcagcgtgcgcgacagctcgcgctccaccgccccagcggcgatttcggcgaagatcggccgaaaacgcgcggccagctgtgcgtagtctgctccggtggataacaggtgttgcgtcatgtcagtgtcctctgcggttaagcgcgatcggccagatcgtcgatatcgcgcgccgtcggttcgaagcgaatgatcagcaggaagacgatggggatcgccgccgccagtgaaacaatccaaaacatgtcggtgccgaagcgcgcctgcaaaatcggcagaataaacagcgccagcgcgctgccgataccggacagcgaacggccgaaaccgacgccggtggcgcggatcgccgtcgggtaagagagcgccgggtaaatcatcatctgcgcgccggggccgaagccttcggcgaacagccataggcccaacatcaggatcgccagcccaacgccgaacgccgcctgcggatgcccgatcaacgccagggcaatcagcgcgataaactgcagcgcaaatccggcgatcgccacgtggcgcgacggatacttccatgccagacgcatgccgagcaggccaccggtaaaggcgaacaacacgttcagcccgagcgaggcggagagggtttcaaacaccccggcgccgagaaactgcgccagaatcgacggcagaaagaaggcgatggcggtgtattcaaaggaaatgcaaacgttcatcacgcaggagaccagagtgcgctcgcggtacggcttgcggaacagcacgcggaagctgaccttcgccgccgccggttgggcggtgtcaggttccgcctcatgggcggcgatgccgtatgactcacgcaggatgcgcgccgcctctttcaaatcgccctggttagcggcccacagcggcgactcgttcataaacttgctgcgcaccatgatgatcagcagcgccggcaccgcgccgaaaatcaacgaggcgcgccacagccagttcgcatgttcggccggcaacagaaaatagagcgcaaagatgatcagaaaacacatcgacgaagcggcgtaccacatcgggcaccaggccgccaggcgcgacgccttgttggccttgccggagaatttggagaattcggccagataggccatcgccaccggcaaatcgatgccgacgccaatacccatcaaaaagcgcgcgccgatcagcacccagacgttgggcgccagcccggcggcgatggcggaaaccacaaaaaacagcatatcggccataaacacctgatagcggccgtacttgtcggtcaaccagccgccgaccaggttgccgagaatggtcccgaccatgatcgaagaagttaccaccccggtcagcagcgggctgaggctgaattcacgcaccacgtcatcgatgccgtaagacagcgtggtcagatcataggcatcgagaaaaacaccgcccagcgccaacagcacgatcatgcgcgcatgggtatttttctcgctgcgttggttaatcaaacgcgccacatcgctggcggagccgatgggcgcagataacggcggcgcggtatcgatatttaaggtactcatagcttcctcgttgtaattggcaggtgacacctcgtttatagggtgaaaaaattacgccgacaaacaacaaatatttctataaatatcattaaaatcaataaactaaacacagttacagcgtaacggaaacgccggattaacacgcgttaatccggtctttatcacggccatttcgggcggggattattctgccgagaccggcaccagcacgcctttcaccagcgggtcgtcggtgtttttcagccacgcctgcaacctgggatcggcaaacgcccgctgcagcttgcgaatattttcgtcctgcagatagggcgtgccaatcaccagctgcgaggcgaaggtcttcggcgccggcgggaacaagatgcccttctcacgcggcactttgccggcgtcgaactgcgacacatagccaatggccgcatctaccgaattcagcgcgcgcggcatggtcagcaaatccagctccttgaagttaaaatggcgtttgttctcgcgaatgtctttcagcctggcggtgcgcgcctcgatcgccggatccagcccgatcagtccaatgcgctgcagcagccacaacgcctgcccctgattggcgccgtcgttgggcaccacgatctccgcgccgtccggcaactcggcgatcgacgtatagcggtcggaatagatgccgaacgcccactgaaacaccggcagcgtcggggtcagcttaaaaccgttggcctccaccacctgctttagccaccactggtgctggtagatcgtggcggcgtactgcccctgcgccaccgcacgatcggcctgcaccgggtcctgcaggccaaccgcctccagcctgaggccgtaatccggcgcgatatgctcgccgacgtactcgatcacccgctgctctccggccatcgccggctcaaagtgcactttcagcgtgctgccgaactgcaccgtctgctgctggcgggcgctgaagtgccaaaccgcggcggcgataatcgccaccgccgcgatacccaccggccacggccagcgtttcttcttcactatctcaaaatcgtgattaggcatgattaaagggtttcctgatgatgacgcaacgcggcgaccaggcggtcaccaataaactgaatcagttggatcgtggcgatcagcaccacaatggtggcgatcatgatgtgattgtcgaaacgctggtagccgtacaccaccgccagatagccgatgccgcctgcgccaatggtgccggcgatggccgaatactcgatcatcgagatgacgttcagcgtgatggcggcgacgatcgccggcagcgcctcgctgagctgcgcgcgggtgactatctgccagatcgaaccgccggacaccagccccaccgccgtcacctccggcggcagttcgcgcagcgcgttctccaccagccggccgaagaacggaataccggcgacgatcatcgggatcaccgccgccggaatgccgatggtggtgccggtcaaccagaaggtgaacggaataatcgccgccatcagcaccagaaacggcagcgaacggcccatgttcaccaaccagctcagcgcgcgattcagcgccgggcgcggaaacaagccgcgcgatgaggtgttgaacagcaccacgccgacggcgccgccaatcgccaccacaaacagcatcacgatgccgaccatcagccaggtttcgccgtaggccggcagcatcaaccgatggatctcgcgccagggtgtgtcctggctcatcacgctgtcagacagatttttcataccgcctccttcaacgccgccggctgttccagcacctcggcgagaatgcccaaccgccgcagctcgtcctgcagttcagccaccgaacgcgaaccgccgccaaaacgcaccgcaatctccaaccgcccggccaggctgccgcccaccacttcaacgtgcccacccaacagatcgatctgcaggtcgagttggcggctgatgcggctgatccagtcggtggccgccggctgacgggcgcagtaggttacctgcagccgcaacgcggcgtcggacgccagcgtcttcagcgggaacagccggcggcccagcgaggaatcgggcgctgccaacagctcgcgcaccggcccttgctgcacaatcacgccgtcgcggatctcggccaccgcgtcggcggcgtcgcgcaccgcatccatctcgtgggtgatcaggatgatcgacaggccataccgatcgcgcagctgtttaagcaggctgagaatggccccggtggcgtccggatccagcccggaggtggcctcatccgccagcagcaccgacggattcagcgccagcgcgcgggcgatgccgaccctttggcgctggccgccggacagctgcgccgggtaaaacgccgccttgtccgccagccccaccgccgccagcaggctctttacccgcttgtcgatatcgcgcggcaccacgcccagataggtcaacggcagcgccacattctgccaggcggttttgcgctgcagcagcgcggaagactggaacaccgtgcctatcgcccgccgctccctgcgcagcgcctcgcccgcaagccgcgacaagtcctggccgttcacccggatactgccgctgctcggccgctccagcaggctgatgcatttcgccagcgtcgatttgcccgccccgctggggccgaccacggcggtaatcgatccggccggcacccgcagcgtaacgcccttcagcacctcaatccggcgcccgtccggcgcgcagtaagccttgtgcaactcctcaatctctatcatcgcatcctcacttgacgctcagtgcatcggccaaggacgcaccggccggccagcggtagcccaccgccgggtgcggctccgccaggcgcggcccctggttgaacaatttttctcgcagagtgcccgccgtgtagtcgcgcttgtacgctccgcgtttttgcagctcggggatcagcagttccaccacgtcggtgaaggtttcatgggtaacggcgtaggccagattgaaaccgtcaacatccgtttcctccacccacgcctgcaattcgtcggccacggtttgcgggccgcccaccaacagcgggccgaaaccgccgatgccgacccattcggcgatgccctgtactgtccattcacggctgggatcggcgctggagaaagtttccaccgccgactgaatggcattggtgtgcagatgcttcagcacctgatccggctgatactggccgaaatcgatgccggtccagccggacaccagcgccagcgcgccttcgtagctggtataggatttgtattcccgccatttttcctgcgcctgtcggtcagtttcaccgacgatcaccgtctgcaggttgaagatcaggatgctgcgcggatcgcgcccggcctcggcggcgcggcggcggatatcggctacggtttttttcagcaatgttttcgaaggagaagcgacaaacacgcattcggcgtgttccgcagcaaactgcttgccgcggctggaagcgccggcctgatacagcaccggcgtgcgctgcggcgaaggctcgctcagatgaatgcccggcacctggaagaactcgcccttgtggttgatcggatgaattttcgccggatcgctgaagatgcgccgctgacgatcgcgcaaaatcgcgccgtcttcccaactgccctccagcagcttgtaaaccacctgcaggtattcatcggcgtagtcgtagcgcgcatcgtgatcggtctgcgcccggtggccaatattgcgcgcgccgctctccaggtaagaggtgacgatattccaaccgatgcgccccttggtcaggtgatcaagcgtcgacaatctgcgggcgaaaggataagggtgctcgaatgacagcgaggcggtcagcccgaagccgagatgttcggtaaccagcgccatcggcgtcaccagcgccagcggatcgttaaccggcacctgcgtagcctggcggatcgccgcgtcgccgctgccgttaagcacgtcgtaaatccccagcacgtcggcgataaacaatccatcgaacttgccgcgttccagcaggcgcgccagatcggtccaatattcgagatccttatactgccaggaacggtcgcgcgggtgcgcccacagccccggcgactgatggccgacgcagttcatatcaaaagcgttaagacgaatttcacgttgcgatgacatagcgagctccacaattatctgccggccacggacggagccgggccggatggggggtcttagggtgttaaaaacgggaatggacgatcagtttgcagccggacatcgcgccagcaggtattgcgcgacgctttgggcgtgttccgccacctgcggcagccccatcagttcgccgaagcggccgcgcgccgccgggccggccaccagcaggcgcgggttggcaaggccgtcgccgccgatcgcctggctgtcggcattgacccacagccccaatcccagcggatcggcgcgcagcgccccctgctccgccagcgaactgagcaacgggctggcggcgatcaggccggcatgagccggccccgtagcgatcagcaaccgctgcgtctgcagcgcccgctctgcgccctggcgcggcagaatcgtcaagcgcacgccctgcggcatgggttccgcccgccgcagacgagcggccaatacctgcagcgtgcccgctgcctgttgctccatcagcagcgtgctcacctgcggcgcaagacgatagcggtgcacgtcccaataggcgcgcagatgccgcagaaagcgctgctgttcggtcggcgtcaatgcttgccacaggcgctggccctgggcgcgcaccgcgtccaacaccgcctgccacggcacccgttgccgagcggcgcgcgccacctcaaggcgcacctgccgcaccccgtcacgcagtccggatggcggggtaaacgaccacgtcgggtactccccttcggcattggcacgcggcagcaagccgtgacgagagagcgcggtaatcggcccgcgatgcccgcggcggtgcaacgccgctaccgcatcggccatcgtcagcccactgccgacgatcgccaacgattcatcgggctcaatctcatccagcgccccctccgcccagggattggcgatcaaacgcgcgtcgcgcgccagttccggggcgatctgccgcagcagcgcgggcggcggatggctggtcgccaacaccacataatcgccccacagccgttcgccgccggcggtgatgacggacgcgccctgcgcctgcggctgcaggtgctgcgcccgatcgcgcaggtgccgcaagcgggcctggcccgactgcgccgcctgatgaaaacgttcctcgacatagcggccgaaggcgccgcgctgcggataggctttaccgtcgcgccacaacgcctgcggatcggccgccagcccgccgccctcgcggaaccagcggtcaaaatcccccgccggttcatccgccagctgcatcctatcggccggaacgttgatgcggtgagtcggctcggtggtcgaatacgccacgccatagcccggcgcggcgcgcggttcgatcaccgtgacatccaccgctccgcgcgccagctggatcgccagtgccgcgccggtgaaaccgccgccgataacgataatatgggcacgcttcgccatcagccctcccgctgcgccgggccgggacgacgatcgccgccgatggtttcgccaaacgggccggtattgatcgtgcgagccgtctgatgagtcgactgcgccagcggcagcagcggcatcaccagctcggcgaagcggtgagcctcttccagatgcggatagccggaaaggatgaaattgtcgatgcccagcgcctgatactcgcgtatgcgcgccgccacctgctgcggattgcccaccaatgcggtgccggcgccgccgcgcaccaggccgacgccggcccacaggttggggccgatgcgcagactctcgcgcgagccgccgtgcagttcgctcatgcggcgctggccggtagagtccatgcgcgcaaagatctgctgcgccgccgcgatggtgtcgtcatccagatgcgcaatcagtcgctcggccgccgcccaggcttcgtcttcagtttcgcgcacaataacgtgcaggcgaatgccatagctgagtttacgcccctgccgctcggcgcgctggcgcaccaccgccagcttttccgccacctgagccagcggctcgccccaggtcaggtaggtgtcgatctgcccggcggcgatgtcgatcgcttccgacgatgagccgccgaaatagagcggcgggccgttttcctgcaccggcgggaacagcaattcggcgccttcgacgcgaatatgcttaccgctgaaatccaccttctccccttgcaacagccgttgatacaccgtgagaaattcctgtgtcacctcatagcgttcggcatggctgaggaagatgccatcccctttgttttccaccggatcgccgccggtcaccacgttgatcagcaggcgcccgtccgacagccgatccagcgtcgcggccatgcgcgccgccaggctcggcggctgcaggccggggcgcaccgccaccagatagcgcaaccggcgggtgatcggtgccagcgccgccgccaccagccaggaatcctcgcagcttttaccggttgggatcagcacgccgtaatagccgaggttgtcggcggccagcgccacctgctgcaaataaggcaggtccaccgggcgcccgccctgcgccgtgcccagatagcgaccgtcgccgtgggtcggcagaaaccagaaaacgttgatgcgatctttcactgactcagtcatttatgcctttcctatataactattttcattatttatcgatagaaaaactttgcttggttataaaaagaaaagcaggatgcgtgccacattgcagattaaaaaaaaccaatgcatatcaatatattgatgagatatcgacgtcaaaacgctgctgcattggcagcaggcggcggcggtaagctgttgccaatgcagcaccgtgcgccttttatcctctcgcggcgactcattggctgggataagatttttttccccatcgtcgtcagacaggagacgcccatgtacgatccccaaccgttcgccgccgacaaaccggtgctgatcgatccggcgtcgctcgctctgcaaagcgtgctcgatcggctggctcccaccgacgccaccgtgctgatcgtcggtgaaaccggcaccggcaaagaagtggtggcgcgctatctgcaccaccacagcgcgcgccgccatcaacctttcctggcggtcaactgcggcgcgctgacggaaagcctggcggaagccgaactgttcggccatgagaaaggcgccttcaccggcgccgtcggcactcatcagggctggttcgaagcggcggaaggcggcaccctgctgctggacgagatcggcgagctgaacctgtcgctgcaggtcaagctgctgcgcgtgctgcaggaacgggagatcacccgcgtcggttcgcgcaaaccgctgaagatcgatgtgcgggtcatcgccgccacccacgtcgatctggccggcgcgattcgccaacggcggttccgtgaagatctctattaccgcctgaacgtggcggcggtgactttaccgcccttgcgccagcggccggacgatattccggtgctggccagacattttcttgcgctgtacgcccgccgtctggaacggccactgccgcggttgacggcggaagcgcagcaggtgctgctggactacccctggcccggcaacgtgcgcgagctggagaacacgctgcataatgcggtcttgctgagccaggagggggcgatcgcaccgcagcaactgcagctcacccatcgcctgacggataacggcggcggcggcgacgacgccatcgatcgctttgtgcagcagcagttgcaaggcgacagcgcgcagctttaccaacgggtgctggatgcgctggtgcgcaacgccttcgaacgcagcggcggcaaccagctgcaagcggcgtcgttgctcggcgtcagccgcaataccctgcgcacccatttggcgcatcttggtctgatcaaaccgcgccgccgcagcgccggcgccccctcacattcaccggccatcagcgcagcgccgctgcccgaacgcgaactgcgcatcggctatcaaaagttcggcaacctcggggtgctcaaggcgcggcaaagcctggaacagctcttcgccacacagcgcatcagcgtgctgtggagcgagtttcccgccgggccgcagctgctgcacgcgctcgacggcgatgagatagacttcggcaccaccggcgaagtgccgccgatcttcgcccaggcacagggcaatgcgctagtgtacgtcggttttgagccgccggcgccgcagagcgtggcgatggtggtgccgcaagacagcccgatacgcagcgccgccgatctgcgcggcaaacgcatcgcgctcaacaaaggctccaacgtgcactatttactgctgcagatgctggacgaacagggattgacgttgaacgacgtgcgtatcgtctacgcgccgccgaagtatccgctgtcggcgaccgatctgcaggcggtggacgcctggatgatgtgggatccgctgctcagcgacgcgcaacgcaacggggaactgcgcgtgatcgccgacggcacccagcgggtgctcaatcagcaattctacctggcgcgccgcgacttcgccgagcgctcgggcgatctgttgcagccgctgatgcaagcattgcagcacaccggccgctacatcactgcgcagccgagagaagccgctcgtcacctttccaacgaactggggctggcgagcgcctcgctggaactcgcgctgtcgcgccgcagccacgagatccgcgccatggatttgcaggtgatccgccagcagcaaagcatcgccgaccgcttctacgccctcgggctgctgcccagagcgatcgccgtgcgcgaggcggtctggccgctgtgatcccctgccgaaagcgccgacgccagatgtccggcggatcccgggcggcagccgacaatgccgccgcctgaaagagggcagagatcagagataaggttcgcccagcgtcaacatcaaccggttggcccaggcgaaaaacgccgtcgcctgcaccaaatccaacagcgccagctcatccaggccctgagcgcgcaacgccgccagttgcccggcgtcagcctgcggcggcgtggcggatagcgcggcggcaaaggttatctgcgcttgccaggcgtcatcctgcccctggctcaacgcgccgcccggcgccaccgccagcaaccgatctatctcggcttcgcgcttcgacagctgcgccgccttgcgcgcatgcaccgaggcgcagtagatgcagccgttcaccttgctggcgaccgtcgccgccaactcgcgatcctgtcgcgacagcccgccggaggtataaaaaatcgcccggtcagccagcgtgcgttgttccagcaccggatggttgcgcgccaacaggcggaagtaatcggaatcggcgtggccaaaccgctctagcaacgcccggccggcgtcatcgaattccgccaacggcttggcggcgatccacggctcccaccccagttcttgccgggtaaacgccggcggcgcgtgacggccgcctcgcgtcgcgctctccgttcgccagcggccggccgttaccggctgatgcgccgcagcgtcgtccgtcttgccgcccaacaaccggtagccccgcagcaagcggctttggaaactgacaaaggcgattaactgcgacaatgtgacgatggcgtccagcgaccagccggcctgccgcagcgcctgcaagtgctgggcgttggcgttggccggttgaaacgccaaacgttctgcatgcgccaacgccgccggcagccgctcgtcttccggcgcgtcgccctgacgttccagcagagcagcgtaatgcgcggccaagcgcggctcgccatgccattcactgatgcgctgagccaaccgcagccgctgcgccagcgggaaatcgccggcgtccgcaggcgcaaacagcgccagatagctggactgaacggcatcggtcgccgcctgccgggtggctctggcctgcgccagcgtggaatccggcgcaatctcggccagttcggccagcagatcgacctggtgcggtaatgtcgtcatagcttttcctcaacgtgatattcataagcaacggcgggcgtgccgcgccgccagcccagttcaggggccacgtggcgggcgataagatcgatagaacgcagaatatgggcgtgcggcgggtcgatggagtgcacctgaaacgccagatcggtgacgcgcgccagcgcgctgtcccgttgcagcgaggctattacctgatctggcgtgcccaagtgcacgtcgaaagcgcggatcaggccgtcgagcgacgtatcggccaaccggtggccgctggcgcgcatccgctccagcccacggctcaacccggccgtggcgaagtcgcgtgcctgctggccgttctcgctgacaaacgcagtgcgcgaccccatgatgcgcggcgccacccctggcggcagcgccgccagataagcgtcaatgatcggattctgcagttcgtccagcggcaggtcaggcgcgtccgccgggcgcggctgcgtgcgcgacagcatcagaccgtcaccggcgcggccggcccgttcgcccccttccaccgagaacgtggcctgccagacgcgctgcgccagctgcggcgccgccgggtacagccggttgtcttcgccgcccaacgcctctccgcgccaggcgctcagcaacgtgcgcaaattctcggcgaatgccgtgttgcgctgcccggcgtcgagaccgaaagcggcgaaagaagacggcgtgccgcccccggccacgcccacctccagtctgccgtcggacaacagatccagtaccgcagtgtcttccgccacccgcagcgccgactccatcggcaacgtgatcaccccggtgcccagccggatacggcgggtgcgtgccgccgcctgcgccaaaaacaccagcggtgatggcagaccgccctcatcggcatgaaagtggtgctgcgccacccaggcggtgtcgaacccggctcgttcggcgtgcacgatctgttcggtcgccagccggtagcgctcctgcgcgctgccctgatccagcaatcgggtgaagaaaccgagtctttttccgctcatatcgcctcctcgaattttggctgtccggcatgcgatgcgcggccgggaatggcggcgatcaattggcgggtgtaatcgctccccggcatggcgaacaactcggcggtggcgccgccgtctacccgctcaccgcggtgcaataccgaaacgctgtgcgaaatccgccgcaccgtcgccagatcgtgagaaataaacaggtaggtcaggtcccgctcctgctgcaactcttgcaacaaatgcaggatctgcgcctgcaccgtgacgtcgagcgccgacgtggcctcatccaataccaatattcgcggttgcagcaccagcgcgcgggcaatcgccacccgctgacgctggccgccggacagttcgtgcggcctgcggttcagcaaatcgggcggcagcgcgacccgttcgaacagctcacgcacccgccgatcgcgctccggtttgccgatcggcgcgaaattcagcagcggttcttcaatcacccgataaagagtctgtttgggatcgagcgagccgaacggattctgataaaccagctgaatgcgctgccgaaactgacgcagcgcttcgcccctgagaccgataacattgacgccgtcgatcaggacctgcccggcatccggccgctcgaaacccagcaggcaacgcgccagcgtgcttttgcccgacccggactctcccaccaacgcatgggtggtgccgcgcggcacgctgaatgacacgcgatccagcgcgcggaacccctggccgccggacagccgaaaatccttaaccagcgcctgaaccacgatcgccggcggctgcccgctgcgtttcggcggcggcgcaacggcgccgctcaatgaaggcgcatcggctaacagtttacgggtgtatgcgctggcaggcgcgcgcagcacctcggcggtagccccctgttcctgcacccggccgtggcggaacaccagcagccgatcggcgcgttccgccgccacgcccaaatcgtgcgtcaccagcagcactgcagtgccgaattcgcgccgcagctcgtcgatcagatcgagaatgcgtttttgcaccgtcacgtccagcgcgctgctcggttcgtcggcaatgatcaacgccggctgcagcgcaatggcgatggcgatcaatacccgctgcttcatgccgccggaaagttgatgcggaaactggcgcgcccgcagttccgggtgcgtcagcccgacgcgggtcagcagttccgtcacccgctgttgtacctgcccgcgcggcaaccggcggtgaatattgacgatctccgccacctgctcgccgatggtttttaccgggttgagcgagctggcgggatcttgcgggatcaggctgatttgcgcccctctcaccgcatccagccgccgcgatgaccagccggcgatatcggtgccgtgcagccgaatggcgccctgttcaaggtggccgttgtcggccagcaagccgatgatcgcctgcgccgtggtggttttgccggaaccggattcgccaaccagcgccaccacttcccccggctcaatcgtgaacgacacctcatgcaccacccttcgcctgccttcgttgccctgataggcgatggaaaccttgtccagcgccagtaccggcggccgcgccgcccgttgccatgccgcttgcatgctcatcgcgcttttcctcccagcgaacggctgatgcggttagccgccaacaccaccgccaccaccaccatgcccgggaaggtggtcagccaccaggcggtggaaatgtagttgcgcccttcggcgatcagcagcccccattccggggttggcggcggagtgccgtaaccgaggaagctcagggtggcgatcgccaggatcgcactgccgaactgcagcgccgagaaggcgatcaccgaagtcagcgagttcggcaggatatgccgccacagcaccgcccaaaagctgccgccgctgccgtaagccgcttcaacgtaatcgctgtgccgcactcgcaccacttccgcccgtgccagacgggcaaagttggcaaccgaagtgacgcccacggcgatggcggcgttgaccgtaccgaaaccaagcaggatgataatgctcagcgacagcagcaggccggggatcgacagcagcacatcgacgacgcgcatcaccgcgtcgtccgccacgccgcccaacgcgccggcgatcaggccgagcgcggtgccgaacaccaaccccagcgccaccgccactaccgcgccggccagggtttgcgacgcgccgtacaccatgcgcgcatacagatcgcgtcccagttgatcggtgccaagccaatgagcaccgccgggcgccagtcgctgcgcgccggcaatgccttcggtgccgctgtaggcggtaaacagctgcggcgccaacgcccacagcaccaccagcgcaatgaccgcccaggccagcaaaagcgtcagggggacacggcggcggctcgaacgactggcgggcagcgcgccttcactttcagcgccggacagatcgcgctccggaaccgtggctttttcaaaggagatactgctcatagggatgctcctgcctgggttttcagccgcggatccagcagcgggaacagcagatccaccagcaagttgatgatgacgaaagcggcggccgagatcagcactatcgcctgcagcaccgccacgtcctgattgaccaccgcttgctgggtcaattgccccaggccgctgcggccaaacacggtttcggtgatcagcgccccggcgatcagttcgccgaacagcatgccggcgatggtcagcgccggcagcatggcgttgcgcgccacatgccgccacagcaccccgctgcggctggcgcccttggcccgcgccaccgcgacgaacggctgggtttgcaccgcatcgatgctgcggatcagaatttgcgccagcggcgcggagatcggcagcgccagcgtcgcgatcggcaaaatcaccccctgccactcgccggggttaatgatcgggatcagcttcaggcggaacgaaaagagctgaatcagcacaatgcccagccagaaggtgggcactgaaacgaacagcgacggcagcatctgcagcgccgaacgcagccagccgaagccggtcaggttggaaacaaaagcgataatcagcgccagcagcaacgccaccgcaaagcccagcaccgccaactgcagcgtggcgggcagattagccgccagcagcgcggtaaccggcaccccggcctgcattgagaagcccagatcgccatgcagcacgctgcccagggtatgcagatactgccgccacagggggacatccgcgccataggccgcgcgcatgtcggcgatctgcgccggactcagccccatgtccgggttctggaatttgatcaggatcgcatcgcccggcagcacctgcagcaggatgaacgacagggtaaaggccgcccacagcaccaatgccgcctgcccgatgcgccccgccagatatcgcttcattgcgcccccttaatgtttctctaaccaggcgccgtagaagctcgggcgaccgaccgcttcgaaactcacccccttcaaataaggcgcaccagcgaacacctgcggctcctcaaaaaacgagatcacgtaggcttggtcaatcaggtagttttgcgcctcgccggcgatctgcaggcgttgttgcgcatcaacctcggaggcaatgccgagcagcagggcattcagcttgtcatcgctaaagttgctgttgctgctggtgccgcccttctgcagcagcccgtcgcggttggttgggtaaaactgacttttaatcacgtccggatcggcgcgccccacctccaccaccgtcgccggggttttctgtgggtcgagattatccgccacccggctgccggcgtcgcccgccagaatgttcagccgcgcgccgactttcccccactgctgagaaaccagctgcaacaccgccttgttctgcggctgcggcaacgattcatacaccgtcagcaccagcttcttgccgtccttttcccgcagcccgtcgccgccctttttccaacccgcttcatccaacagccggttggcctgctgcgggtcaaatttcagcttgtcggacagatcgacaaagccggcggccgaggaggcgatcaccgatttggcctgcgggtagttggcggagaacagcgtatcgacgatctgcttgctgtcggtggcatgcagcagcgcttgacgcacgcgcagatcggccaccagcgggttatccggccggaaagcgatgctgtcgttgacgccgcgcgtcggtgcggcataaatgataaagccctgatcctgcgtttgcttctcgtcataggcctggatctggcggataaaatccgcctgcccggcctgcagcgcaccgatgcgcacgctgtcctcgccggtgacgatcaccttgatgccgtccagattggctcgcccttgttggggcgatttgaccggcccccagtcataatccttacgggcgctaagctcgacctcacgccccagcgtttcgccgctgaccacaaacggaccggaaccgatgatatggcgcgcatcgcccagttcgtcgtagctgcggttcagcgtgctgagcgataccaacccggagccgatagtggcggtgccctgcaggaaacccggcgacgatcgcgtgaaatggaatttaaccgtcagcggatccaccacttcactgcgctggtagttattgatcacctcggaaaccggcaggcgtttctccttgttgcccagcccgtaggtgtcgaagttcttcgccaccgcgttggcgtccagtggcgtgccgtcggagaaagtcacgccggggcgcagcttgaaagtgtattcggttttgtcggcgttgctgctccaggactcggcgatccagggttcaatctccagcgtcttggggttctggtaagtcagcttgtcggtgatctgattgagaataccgccgttggggtaaaacccgccggaaggcggataaagattggtgtgagcctgttgttcgaggtagatcagcgtgccgccctgcaccgccgccaacgccgggctcatcgccgccgcccctcctaacgccaccgctattccaccggttaataccttgaaagaaaaattaaacattagtgccgcacccatattatttctgaaagttatgggttagataacaaaccaaatcggcggggaattgaacgaactaatttcgctaaccaatggtgtaaatcgcacaagacgcgtctcttggcggcgaatgcaatctgttataaagtatcaaaacctcagccaaaggaagacgacgatgaaaatccagctgtcgctgctgtttctcagcctgttggccggcaaggctgcggcgtttcagtcaaaagtgcccgagccgcgcaccgaacaggcgcgtgcggcggaacagaacatcgaaaatctgttttacggctttcacgctatggatgcccagccggtgaatatcggccgctgtgaggcggtgccggtggcgggatgccaatgcgcattctgcacccagctgcggcaggccgggcgctgaaccgcccccttattcacccagctcatattgcacgttcaattgccctttcttcatctttaggccggtaatcgcgatcgcgcccacctcgcccagcgcggcgacatgggtgccgccacagccgtaggcgggcagctcgccgaagccgacctggcgcaggccgtccaccgcctgctggcggcgcggcagatcggcggcgatcaaacgcatcagctcctcctgcaaaaagtccgcttctatcgtctgcgcatccggtcccggcgcgaaagtgatgcgcccttcccccggccaatgatgcgccttgaccggccgccagccccgtgtttcgcccaaccagccgatcagatgcccagcggagtgccagcgggcgtgcagccgacgctgcgcttcatcgatttgcatcgtaaccggcccgttcggcagcggcgcggcggtaaagtgcaccacggtatccccctgctgctgcacccgcagcacggtaacaccgcctaacgcccccacatcggaaggttggccgccgccctgcgggtggaacagcgtggcgtccagttccacggcgtaagcgcccgcctcggccggcgcacagctcaacacccgcgcctggccctgtaaatcgtcgctgtagtaataacgtcgctcggtcatcattttttctcctcggttcggagagccattatattcatgccataatcggaggataatccgccgccatcacaatggacttttgcgtcatgagcacaaatctttcttacgcgctgttggccgaaatggccgttttcgttcaggtggtagagagcggcagcttttccgccgccgcccgcaagctgggcgcttcgccttccgccgtcagccgcagcgtggcgaagctcgaacaggcgctgacgctgcagctgctgcaccgcaccacccgcaaactgcggctgagcgaaagcggcgaagaggtgtttgcgcactgccgcaccctgctggcggcggccgacgcggtcatggcgatcggcgggcgcggcgccgcggagcccgaagggctggtcagcgtcagcgtacccaaagcggtgggccgcttcgtgctgcatccgcacatgccggagttcctgcgccgctacccgaaggtggacgtgaggctgcggctggaagatcgctacatggatttgatagacgatcgggtcgatctggcgctgcgcattaccgatcgcccctcgcccgggttgatcggccgccagttgatgagaatagaccatctgctgtgcgccacgccgcactacctggcgcagcacggcgcaccgcagcatccgcacgatctggcggcgcacagctgcatctatctgggggaaacgccgagcgacgcgcaatggaaattccgccgcagcggcaaaacggtgacggtcaacgtgcgcggccgctacgccgccaaccacaccggcgtgcggctggacgcggtgaaacagcatatcggcatcggcagcctgccgtactttaccgcccgccaggcgctcgaagacggcgagatcgtgcaagtgttgccggaatgggattttctcagcagctatcacggcggcctgtggttgctctacgcgcccaaccagtatctgccgcccaaactgcgggtgtttatcgactatctcgtcgcctgcctggcgcaggagccgcagctaaagcgccttgcgtagcgtgatgttgatgcggtgcggccccaccagcgagtggtagccttccttgaccggcaggatgccgtgaaaacagagccgagatgggccgccccacaccaccacatcgccgtgcgccagcggaatgcgccgcgcccggtcgccgcgctgcaggccaccgaactgaaacaccgccggcagcccgagcgacaccgagacgatcggcgcgccgaagtcgtgttcgtctttatcctgatgcagcgacagcttgctgcccggatcgtaacggttcatcaggcaggaatccggcacgaaggggccgaagcccgcctgctgcgcagcttcgtccgccagcgccatcaggatcggcggaatggccggccagcgtttgccgctgcgcgcgtcgcgttccgaatagcggtagccccggctgtcgctggtccagccgttgccgcaccagctcatcgccaccgacatcacgtgcccgccgggggtggtcaaatgccgccacggcacctgcgccaccacgccctgcaccgccgccagcagtgccggcccgtgatcgcgcacgaagccgtgcatcaccaccgcgccgggggcgatctcttcgcgccacggcggcggcagcgcgtcttcaaaaagatcgattgtcatcgccaaaacctgtatgaatacacagtatccattgtaacccgccgccgccgattgtccagcgcccggcggcgccattgttgttggcggcaaatttctctacagtagccgccataaaatcaatcactcaccaggaatgcgtgtgattaagggcatcactctttcagtcgtcgcctccatcttgttcggcgcgatgtattacttcacctctaccctcaccccgctgaacggcgagcaggtctacggctggcgcacgctgctgacgctgccgttcctgacgctgttcatggcgctgtccggcgattggcgcaaggtgggcgacacgctggcctggatcggccaacggccgccgcgtctgctgggcctgctgctcacctcggcgctgctgggggtgcagctgtggctgttcctgtgggcgccgctgcacggcaaggcgctcgacgtgtcgctcggctattttctgctgccgctgaccatggtgctggcggggcgcctgatctatcgcgatcggctgtcgctgctgcaaaaactggcggtggcatgcgccatggtgggggtgggcaatgagctgtatcaggcgggtggcgtgtcgtggccgacgctggtggtggcgctgggttatccgctatactttattttgcggcggcgtttcggcaccgacaatctcggcgggctgtggtgcgagctggcgctgatgctgccggctgcggcctggttcgccttcggcgacggtggcgccgcggcgttgcagagcaatgccgagctgtattggcgcattccgctgctcggcgtcatcagcgccgtggcattggtgtgctacatcctcgccagccgcctgctgccgttcagcctgttcggcctgctgagctatgtggaaccggtgctgctggtgatcgtcgcgctgctgctcggcgagagcatcagccaaagcgagtggccaacctatctggcgatctggctggcggtgctgctgctggcggcggaaggtgcgcaacacctgctgcgccgccagcgggtctgactcaggcggccagcgtggcgccgccgtcgatcacgatatcctgcatggtgatgtggctggccaagtcggaggccaggaacaacaccgcgttggcgatctcgtccgggcgggcgattttacccagcgggatccccagtttgaacagctcggggaagccggcgatggtgcgctgctgtgcatcgtcggtctgccacatgccgcgctgcatcggcgtgtcggtcgagcccggcgacaccagattgcagcgcacgccgaacggcgccatctccagccccacgcagtggttcaggctggtcagcgccgccttggaggcgcagtaggccgccatctgcgcgcgcggcacgtgcgcggcgttggagccgatgctgacgatcgcgccgctgcgctgcgccttgaagtgcggcagcacggcgcggaacaggtaaaacgcccccgaggcgttgacgttgatgcactggtgccagtcatccacgctcagatcttcagtattgcccatgcgcagaatgccggcggcattgaccaacacgtccagtcgcgggttttccgccagctgttggcggcacaccgcctccacctgctccggccggctgatgtccagcgtcacgcaagggtaaggcagatccgggttggcgaactcgcggtcaaaccccaccacctcggcgccctgcgtcaaaaaatgccgggcgatctgctcgccgatgccgcgcgccgcgccggtcacccacacgcgtttgccggtgaaatccatctgaatgctcatgcgcgcaccgccatccgggcgcacagccgggtcatgttgttgttcatcgttgtctcctgcgaaaaggataggatgcggcgtgctgcgccgcaaagtggccctacagcgcgccgctgttcaggccgaaagcgttgagcatggtgcccagtttggcggcggtttccatccactcggactgcggcgtcgaggcggcgacgatccccgcgccggcgaacagccgcacccggttgccgcgcagcaggccgctgcggatgacgatcgcccactcgccgtcgccgttggcgtcgcaccagccgacgatgccgctgaacaggccgcgatcgtgcggctccagatcggcgatcagctggcgggcgctctcggtcgggaagccgcacagcgccggcgtcggatgcagcaggcaggccagctgcatcacgttgagcgccggattcagcaactcgccgcgaatgcgggtggacaggtgccacatggtgccggtgctgagcagcgacgggccgctcggcacgctcaggctggcgcacagcggcgccaggcgccgacgaatgtcgtcgatcaccagtttgtgttcgtatttgtctttggtcgagcgcatcaggcgctcgctgccgaggcgatcctgccgcgcatcgtcctgacggcgcgccgaccccgccagcggattggtgtggatctcgccgccctgcttgcggatcagcagctccgggctggcgccgagcagcacgccgccatcggccagcggcagggagaagtggtatccggtcgggttctgcaccatcaggttattgaggatttggtggcccgccaccggctgctccagctcgatgtcgaggatgcgcgacagcaccgccttgtccagcttgccttgtttgaagcggctgaccgcttccgccaccgcgtgcttgaagcgcggctcgtccggaatgctggtgcaggcgaccaggcgatgcggctgttgcagcatcgggcgcgcggcgcgggtaaagctgtcgttggcgacaaactggcagttttcaggcacgtacaggctggaaggccggcgcgtatcgaacggaatggcgcccaccaccaccggtgccgcctggccggcggctttggcgcgcgccaacgcctggcggatatgctgcgccagcgcgctgtcttcctgctcgccgccgaacgccggcgtctcaatgcgctcgaacacgccgctggcggagagggaacggaattcggaccggtacaaaaaggtcgattgttcggcgtacgcaaacccggggaaggtttggttttctgtcgtcagtgtcgccacaagaccactcctttgttgcgcctcaccaatgataatgtttatgcgaatagttatcattagctgtaaagggatggtaaattacaccggttccccaccgtgggtcaatctccgatgaatgaatctttccgcccgctgcgtcaaatccgcgttacggcacggaaagaaataacacattgttattattgtattttagcaaaaaataaaggtcgtgacgtcgtcaccttcacgccaaaaatgcccgctgaaccggcgcccggcggcgcaatgcggcgtcaatgtcttaagcagctctaatacgaacgtctgccgctgcacatccacggccgtcatgcgcgcatcaagaaaatcgaagtaacaacgcacctgcggatacagcgccttaaacaggctctctttggcggaaaacgtcagcgtcagcagcgcgttgaacggcagcgtttcgcccagcaacgcctcgcgctccgccggtgaaacgatcgcgctccacagctcctcagctcgctccacggacagcaacgtctccacgtccagcccaacgccgcccagcccgctctcgcggtgcacggcgcacagcgcggtatgcgaattatggctcaacgccccggcaatgcccggcggccactgcggcgcgcggtcttcgccgcgcgccagggtgaagtcggcgaaaccgagtggcgccagcagctggcgcgccagaacacgtccggccagatactccgcacggcgtttcggcaccgcgcgcgccagatggtccggcaacgtaaaacctgcctcgggataactctcgtcgcggtaatccgccagcgcaaaatggcagcgcgccacctggcccggataaccgtccggcgtgaaaaagtcgatattgcggataaaagtggggatccggcaggaatcagagtcactgcccaaagaaagcttaatcaccgtcgtttaacttctcagcatcctggcgtaccgccaccagctgtgtaagcagttccggcaacgccgtttgcaccgtcgcccagaccacttcaaggttgatatcaaaataaccatgcgcaatgcgattacgcatgccgcgcatgtttcgccaagggatttcaggatggcgttgcgtaaacgcggggctgccatccatgattttcgtcacggcttcaccgatgataatcaggctcataatgaccgcctgctgagtgcgtttatcttcgataaaatctgccgacgtcaagccatcaacgaaatcgcaggcatcctgcgccgcctgttgcatgtgactcagataatcgaccaaccgcgcatctttcataccggctgggcctccgccaaaacctgctggcgaaaggccggcggcaaatcgagcggcgtcagcagatccacctgtatgcccagcagcgcttccagttccgactgcagcccccccagatcaaacaacgtggcgcccggcaacgcatcgaccaacagatccaaatcactgccctcccgatcggtgccatgcagcaccgagccgaaaatacgcggattggccgcagggaacagcccaaccgtttttcggatcgcctggcgatgttctgcaagaacaatggatggtcgcatggttttctctccccgttacacctaacgaaatgctaggtgatcggttgaggggattcaagcacaatcccccggcagccgcgcctatgcctctcccccgcattcgggagagaggctgggcattacaggatgcccttcatggtcttctcgaaatcgctccaggcgcagaaaccgtctttatcgatcgggcagcctttcagcgccagcgtcacgcgctgcggcggggtttgcagcgtcagcggcgtcgccttgcgcagctgttcggtggactgatagacgtactcgatcttcagcaattcacggctgttctgcgcgtcgcgccagcgttggaacaccagcttgccgccgatcggcgttttctcatactgctgcggcagctgatacggctggaactgcatggccgacagcagcgaggcgatattggagtcgtggccgaccagcaccgtcagcttcggcgcgtccggtttgcgctcgccgagcagcgcgttgttgatataagtcagcagcggtttggcgacgttttgcgccaccaccggcgaggtgaacagcgaatcctgatagccgtctttcagctgcgccagctgtttccactgatgcggggtagcgattttgccccaggccacctctttcatcgggaaaccttcgtagtactgcagcataaaggcgtccaccagcgagttgcccacccgcagcgggccggagacgcccggctctttgcccggcaccgcgctcatcacgctggcttctttggtcagatcgcagtgtttgtcggtcttgcaggcggcggaatccttgtaatcgatgatcttcgccagctgttgataagaggcatccagcttcagcgatcccagcgcggcgttcatcgccgccagcgcctgctggttgaaggcttcgccggtgtcggtgatgatcgggttgaaggtcggatccatctcgcccatcttgtcctgatggtgcacgctgacgtcgcagcccgggaacgcgccgttgctgaagaactgcgcggtggccaccgtgcgctgcaggctgttggcgtagacgtacacgctgccggcggtcgggcagccctcttgcggcaacaggccggtctgcttcagccaggcgttgaagtagtgccccatgtacacttccagcaccccgcccttggtggtcagctggccgcccggcgtttcccaggccggccaggccttcggcgtggactgcgccagcacgctgccgttgttggccagcggcgcgcgcaggttatggcggctcatcaccagcacctgttccagttgataaccgccggcttccgccagcgcgttcccggtgaataacaaaggcaggcacagcaataacgttttttttctcatccgcagaggctcccggaaaatgattatttttaaggtgttagcgtttgcctgagtatgatggcggggttagtgtgacaagtgtgtgacagggttcacgggaaaagatcgtaccagcggccaccgggcggcggccgctgtagttcaactcagtaccacaggctcatgatcggccagccgatcagcagcagcgcggcgatgtacaccacgccgagaatgccgcccaggcgccagtagtctttcgacttcacatagccgcagccgtagataatcacccccggcccggtggcgtacggcgtcagcacgcccatgatgccgatcgacagcaccagcagcatcgacagctgctccatcggcacgcccggcaaccctttgccgaccgccaggatcaccggcagcatggtggcggtgtgcgccgacaggctggcgaacaggtagtgggcgaagtagaacaccagcaccagcgccaccaccgtcatgttcggcgagaagccgtccagatgggtgctcatggtctgggcgaaccagtcgataaagccggagcgcgtcaggccgttggccatcaccaccagcgtcgccaggttaaccagcgtattccaggcgctggaatatttggtgatttctttccacgacaccacgtgcagcgccagcatcagcgacaccgccaacaggcacaccgcggtggcgtccagcaccttgccgccgaacacccacaggcacaggctgagcagcaccaggccgatcagggtgtattccttgcgcgtcagcttgcccatttcccccagcgcggtatccgcccaggcggccacttcgctgctgtgggtcacacccggcttgtacagatagtaggagatcagcggcgcgatgatcagcagcagcaggccgaccggcaggaacgccaggaaccactgcatccagctgatgtgcaccccggcgatcttgccgacgaactcgatgcccagcacgttcggcgcggcgccggtgacgaacatcgaggagctgatgctggtgccgaccaccatcatccacatcaggtagccgccaatgcggcgcgaggagggatcgttagggaaggaatcgaacagcggcggcaggtttttcaccaccgggaacacggtgccgccggtgcgcgcggtgttggacggcgtgaacggcgccagcaggatatcgatgatcaccaccgcatagcccagcgtcagcgtgcgcttgcccatgaatttcaccaggaacagcgcgatgcgccgccccagcccggtggcctcgtagcccagcgcaaaaataaaggcgccgaacaccagccagacggtggtgctggagaagcccgccagcccccatttcagcgcctctttaccggccttgaagcccggctccgccagttcctgcgcgccgaacaacacccagttggcgctgagcacgctgacggtcaccgcgataaagctgatggcggtggcggggatcggctccagaatcatgccgacgatcatcgccacaaagatggcgaaatagtgccacgcctgcggcggcatgccgtcgggcaccggtatcaataacaggatcgcgagcaccgccagcggcgctatcgctttccagatcttttcctgggtttgggacatagggactctcctgaaggcttggttattattcttgggcacccagctgcgccagcagccaggtcactatcaacaggtcggcgctgccgccggggctgaggttgcgggcgatgcagtcggcatcgaagcgccgcaggcgtgccaggcccgcctccccggccgaaccgccctgcgccagcagcaacgccgcccggcgccgcagccagcgcagtccgtgcaggccgccgcgcgaggcgacgttggtgtcaccgttgtgggccatcagccacagcagactgtccagcagcgcccgctgttcgtcgccgtcggcggccagccgttgccgatacagcggcagcgcgccgtcaagcaccagccggaaaccggcctccgcctcgccgcgcgcgccgctgaggccgtaggcagcgaacagccgctggccggcggtctgcccggcgttgttgcgccgcagctcgcggtccaccagcccccgacacatcgccgccgtttcggcgcacagcgccgctgcgccgatggcgcgcccctgctgctgcaggcggccaaaggcggcgcacagcaacccgagcgagaacacgctgcccttgtgggtgttaatgccgccggtggcgcgaaacatctggttttcgcaggccaggccgagcggccgcagccgcgccagctgctgttctgccggcaaagccgcgtcttcccgtccgcgttggataaagcgcggcagccacacgccgatggcgcgggcgctacggtaaaaatgcccgagatccatatcgcggtgggcgccggtgttatggcgatccaccagccccggcttgggcgtgaggttgacttccaccagcagcgcgcgaaaggcggcgcgggcgaagtcgcaggccggttcggcacggcgggcaggcagattaatcggcagagagcgcatcgttgaacatcctttccatttcatgcagcagctgctcgctgctatgccgccgctggcgggcgcagatcttggccggttggccacacagcaggcagcgccgttccggcaggccgatgtcgcggcgcgacaaaatgcgcccctgcgtatccagcacgtcgatgtcccacagccggccgatcgggcggctcacctccagctgcatggcgcagtccttcacccgctgggcgtcggcgcgcagcgccacaaacccttcgcagccggtggcgagcgccagcgcctcggcctgcgggctgggccagccctgttcggcgcacagccgcagcagcgccgcccagccgaggttgaagatgccgcgcgtcagcgcgctgtccttcaccgggccgggcaccaccagcgtcagcaccagcagcgtgcactggtgctgcgccagccacgcctgctggcgcgcctggcggcattcgcggctggtgagcagctccggcaggctgaccgcgcgttcggcggccagttgaggatcgacggcggccatcggttactccgccacctgatgcaccacgtcgatcaccgaaccgtcgcggtagcgcaccaccgccaccaccttgtcggtaaaagcgatcggctgcggttcaccggtcagctgcagcgcgcgggcgcgcagccagtcgatgctcaccacctcgagtccggcctcccgcaggcgctgcgccagctccggccgcgccgggttgacggcgatgccgtggtcggtcaccagaatgtcgatgctggagcccggcgtgacgcaggtagtcacctgctccaccagcgtcgggatgcgcccgcgcaccaacggcgcgacgatgatcgccagccgcgcggcggcggcggtgtcgcagtggccgccggacgcgccgcgcagcacgccgtcggagccggtcagcacgttaacgttgaagccggtgtcgatttccagcgcgctcagcaccaccacgtcgagccgatcgaccgaggcgcccttggagctgaagttggcgtactggttggcgctgatttcgatatggcgcgggttgcgcgccagcgaggtcgccgccgcccgatcgaagctctgcacgtccagcagcttgccgatcagccctttctcgtgcagatccaccatggtcgaggtgatgccgccgagggcgaacgcggcgcgaatgccgcgggcgcgcatcttgtcctccaggaaccgggtcaccgccagcgaggcaccgccggtgccggtttgcagcgaaaacccttcggtgaagtagcctgaaccggcgatcacctcggcggcgcggcgggcgatcagcagctcgcgcgggttcgaggtcatgcgcgtggcgtcggcgccgatcttgtcggcgtcgcccacccgctccagctgcacgatcagatccacccgatcctgcgccaggctggcgggatgatgcggatacggcaccagctgctcggtcagcagcaccacggtgcccgccgcctcggcgtccacccgcgcatagccgagcgagccgcagcaggcttcaccgctgtagccgttggcgttgccgaactcatcgcaggccggcacgccgaggaaggccacgtctatcttcagctcgccggattcgatcaggttgacccggccgccgtgcgaatgaatttgcaccggctccgccagcagcccgcgcgaaacggcgtccgccagcgggccgcgcagcccggaagtgtaaatgcggctcaccacgccgtggcggatatgctcaaccaacggcgcgtggcaatcggtcagcgaactggaggccagcgtcaggttgcggaaccccatcgccgccagcgtctccatcacctgattgagcgtcaaatcaccaccgcgaaacgcatggtggaaggaaatggtcatgccgtcctgcagcccgctgcggcgcaccgcttcctgcaaggagtcgcacagcttgagatcgcgcggtttgcgcgcctgcaggttggctttggacacgtcctgatagcccggcagatccgccgggttggcgaaggtcatcaatcgttgttggcggttcatcatgcttcctccccgtgctgcgccggttcttcccgtaagccggacagcgcggcgcgctccagcaccagccgggcgcgttcaatcaccgggctgtcgaccatttttccgttcagcgacaccacgccgcgcccctcccgctccgccgcttcggcggcgtccaccacccgctgcgcgtgcgtcacctctttggcggtcggcgcgtacaggttgtgcagcagctcaatctggcgcgggttgatcagcgatttgccgtcgaagccgagctgtttgatcagcgccgcctcctgcaggaaaccggcctcgttgttggcgtcggaatacacggtgtcgaacgcctgaatgccggcggcgcgcgccgcctgcagcagcgagcagcgggcgaacagcagctcaatgccctccggcgagcgttcggtgcgcaggttgcgcacatagtcttccgcccccagcgcgatgccgataagacgcggtgaagcgtgcgcgatcgccaccgcgttggtgatgccctgcgccgattcgatcgccgccagcagcccggtgctgccgaccggccggccgcaggccgcttcgatggcggcaatctcgcgctccatgtcgataacgtcctgcgcgctgtcggtcttcggcaggcgcacgatgtccgcgccgccgcgcaccaccgcctgcaggtccgccagaccgtaggcggagtcgagcgcattgacgcgcacgatggtttccacctcctggtatagcgggtgctgcagcgcgtggtacaccagccggcgcgccgcgtctttttcacgcaggatcaccgagtcttccaggtcgaacatcagcgcatcggcctgatagataaaggcgttgctgaccatcgccgcgttggcgccggggacgaacagcatgctgcggcgcagccgggttttattcagcgttttcatctttcgcctcccacggcagttggccaccctcgcaggcgcgcatcagcgcggtttccagccgggcgcgcagcacgcagtccagcgcccctttgtcgtcgacgatcacctgcaccggctccacctcataacgctgcagcacttccagcagggtgcgacggatcgccgcgccgaactgtttttccacgctgctggcgatcagcagatcgtgctgcggcccctcggcgggcgcgatgcgcaccatgacatcgctggattccagcgtgccggccattgcttctcggataattttcatcattcacctgattgtgcggactcaaaaggatgcggggccgccttggcccggcgctgcgtttgcagatcctgcaggtagtacagggtgtccggcggcaccagcggcgcggcagcgtggaagtcccccgccgccagcagcttgcgcacccaggaggcggagatcgccgtgccctgatattgcaaacgctcgatttccaccagcgcgatcggcgggctgggcagcgccggcgtttccagccagtagcgcatgtcgcggttgtatttcgcggtcaccgcgcagaacggctcgttgccgacgaagcggtgcgtaatgcccagcgcgggcgccagatactggcggaagatcttcagatcgatttcggtgtaacagtcgtcggccacgccctggtccttgatgaagtaacaggggaaggtggcgcgcgagatcacgtactgcgagccttcgtgtaccgtgaggttggggatgtcggcagtgccggccagcaccagccggcgccggtcttcatagctgaagcgcgaggtattttccttcaccagaaacaggtgcagccagtcgcagcgcttggccgcctgacgcaccagatactggtgcccgcgggtaaaggggttggcgttcatcacgatgctgccgatggtgtcgcccggccgacgttggctcgccagttgggcggcgtagcgtttcaggcggcacgggctgttttccatcagcaccacgatgcccggcacggtggcaatcgggtagaaaccgcactggcgaaacagcggctcgttctgcaccttggtgtagataaacagctgggtgtgatggcgctcataggccaggttcaccagctcggtcgccagcgccagcgccaagccttcgccgcgcatcagcgggctgatggcgacgcatttgataatattgtcggcgatgccgccgcaggcgaccaatttgtcgtgctgggtaacggtaataaatatttcaaccgtggtatcgatattcagatcgttactgcgcaagaaggcgcttatttctgaaatcgctttatgatccgatcgctttacccgattaaatacggcatcgcctaacataacacgctctctgggttaactggcaaacaacaaatgaaatacaaaaatgcattttaattaacatcagaaatggcaattaaaaccttaaaaaccataaagataaaatcaccctctcgttcaataaacccatggtaagcagaaaaaaaacgcggattattgacctatttcacaaaccgatcccggttaataagttatttaatgttctttatttgcttaattaatcttatggtgtttattattgagataatctttatttggcgccgcaattcacttacattcacttagcatttttattgcaattacgggtcgcactatggaatggctgaacatcctgatcgttgaagacgaaacgccgctggcggagatgcacgcggagtttatccgccagaacggcggctgccgccagatttggctggccggcacgctggcgcaggcgcgcgccatgaccgaacgcttcaagccggacctgatcctgctggacaactttctgcccgacggccagggcatcaccctgctgcgcgaactgacgctgagcgggtatcgcggcggcatcgtgttcatcaccgccgccagcgacatggctaccgtggccgaggcgttgcgctacggcgtgttcgactacctgatcaaaccgctggcctatgaccggctgagccagacgctgcagcgcttcagccagcgccgcgaagcgctgaaagacaaggcgcgccttaaccagcgccgcatcgacgagatgttcaacacctacgcccgcggcgaacagcaggcggcgctgcccgccggcatcgacgagctgacgctcggcaagattcgcgcgctgttcgccgagcccgccgcgcgccacaccgctgaaagcgttgcgcaaaaaatggggctcagccgcaccaccgcgcgccgttatctggagttttgcaccgccgcgcagcagctgcgcgccgagatcatttacggcaaggtgggccgcccacagcggatctaccgtgccggcgagccgcattagcggttatttgatcgcccttgcaaggttgcgtgtaaccgctttactttttatgcgccggtcagcatcttggtgagcatcacctagccgactggacgatcgccgatgcccgctgaacccctagcttccctgtccgagatcctcgcccgccgtgactggcaaaaccccgcctgcccccactaccgccggctggacgcccccccgccgttcgccagctggcgcacggtggaagacgcgcgcgacgatgcccccagcgccagccgccggtcgctgaacggcgagtggcgtttcagctatttcccgcgcccagaggcggcgccggagagctggctgcagcaagatctgccggacgccgccccgctggcggtgccgggcaactggcagctcgccggctacgacgcgccaatctacaccaacgtgcgctacccgttcccggtcgatccgccacgcgtgccggaagacaacccgaccggctgctactcgcgcgccttcagcgtcgatccggcctggctggccaccggccagacgcgcgtcatcttcgacggcgtcaactcggcgttctatttatggtgcaacggccactgggtcggctattcgcaggacagccgcctgccggcggagttcgatctcagcccgtggctgcagccgggtgaaaaccggctggcggtgatggtgctacgctggtgcgacggcagctatctcgaagatcaggacatgtggcgcatgagcggcatcttccgcgacgtcagcctgctgcacaaacccgccgcgcacctgagcgatgtgcgcatcaccaccccgctgcatgacggctttacccgcggcgaactggtggtgacggcgcgcgccagccggcccggcccgctgcaggtgcaggtgcagctgtggcgcgatggtgcacgggtggccgagcgcacccagccgctcggcggcgagatcgtggacgaacgcggcgcctatgacgatcgcgtcacgctgcgcctgccggtggaacgcccggtgctgtggagcgccgaaacgcccgcgctgtatcgcgccaccgtcgccctgctctcccccaagggggagattatcgaggtggaagcctatgacgtcggcttccgccaggtggaaatcagcggcgggctgttgaagcttaacgggcagccgctgctgatccgcggcgttaaccgccacgagcatcacccgcgccacggccaggtgatggacgaagcgacgatgcgccacgacatcctgctgatgaagcagcacaacttcaacgcggtgcgctgctcgcattatcccaaccacccgctgtggtatcggctgtgcgatcgctacgggctgtacgtggtggacgaagccaatatcgagacccacggcatgcagccgatgaaccggctggctgacgatccgctgtggctgccggcgatgagcgagcgcgtcacccgcatggtgcagcgcgatcgcaaccacccttgcatcattatctggtcgctgggcaacgagtccggccacggcgtgaaccacgacgcgctgtactgctgggtgaaaagccaggatccgacccgcccggtgcaatatgaaggcggcggcgccgacaccgccgccaccgacatcatctgcccgatgtacgcgcgagtggatcaggatcagccgttcccggcggtgcccaaatgggcgatcggcaagtggatcggcctgccggaggagccgcgcccgctgatcctgtgcgaatacgcccacgcgatgggcaacagtttcggcggctttgagcgctactggcgcgcgttccatgcacatccgcgcctgcagggcggctttgtctgggactgggtcgatcaggcgctgatcaagcgtgacgagcgcggcgaggaattttgggcctacggcggcgacttcggcgacacccccaacgatcgccagttctgcctgaacgggctggtgttcgcggatcgcaccccgcacccggcgctgttcgaagcgcagcgggcgcagcagctgttccgcttcgccttcgacgccgcctcgctgacgctgaccgtcaccagcgattacctgttccgccacaccgacaacgaacagctcaactggcggctggagctggacggcgtggagcgcgccagcggcagcctcgatctgacattgccgccacagggcagcgcccgctttaccctgctcgaccgcctgccgatgctgcatcagcccggcgagttgtggctgaacgtggaggtggtgcaaccgcaggccaccgactggtccgaagcgcaccaccgctgcgcctgggatcagtggcgggtgccacgcgcgctgcatcccgcgccgccgccggcgcagggcgtgccgcccacgctgattgaagacgatcaggggctgaccctcacccacggcgaccagcgttggcgcttcgagcgcagcagcggccacctgacgcagtggtggcagaatgagcagccgcagctgctgacgccgctgcgcgacggctttgcgcgcgcgccgatcgacaacgacatcggcgtcagcgaggcggaccatatcgatcccaacgcctgggtcgaacgctggaagctggtgggcctgtaccggctggaggagcactgcgtgcggctgcaggcggatgcgctgcaaaacggcgtgcgggtggtgagcgaacaccagttcggcgtggacgggcagattttgctgattagccgcaagcagtggctgttcgacgcgctgggcgcggtgagcgtgaatgtggaggtcgaggtggccgacgccctgccgccgccggcgcgcatcggcctgaactgccaactggcgacggtgcagccgcaggcggaatggctgggtctgggcccgcacgagaactaccctgatcgccgcctggccgcgcagcatgggcgctggcgcctgccgctggcggatctgcacacgccgtatattttccccggcgagaacggcctgcgctgcgacacccgcagcctgcgctacggcggctggcgcatcgacggccgcttccacttctcgctcagccgctacggcctgcaacagctgatggcctgcagccaccagcatctgctgcagccggaagcaggcacctggctgcacctggacggcttccacatgggggtgggcggcgacgactcctggagcccgagcgtgcaccgggattacctgctcaccgccggcgtttaccgctatcagctgcgcctgcagcgggcgatcgagggctaaatctgccaaaaaactcaacgggttgcgcattctgtaagcaaacagtcacagaatgtgtaatccgcctttgacatgctgacgacgcctcgctattattcgccccgttcacacgattcctctgtagttcagtcggtagaacggcggactgttaatccgtatgtcactggttcgagtccagtcagaggagccatatttagaaaagcccgctcagggaaacctgagcgggctttttgctgttgggcggctatgctcgagtatccccgacactctctacccgaaaccggtcagccatccgttgaacgggtaagtttctcccattgttcaatttcctgacctaacgcctcgagcttttgccgcaccaaacttaatgcgtcactgcctaacaacagatgcgtgggtgggttccggctctcaatcactgccagcatggcgtgagccgccttaatcggatcgccgagttgcttaccgcttttttcctgacgcgcctgacgaacaggttcaaataacgcgtcatagtccgggagacggcgagggctgcgcaccattgaacgcccggcccagtccgttcgaaacgagccgggcgctactgcggtcacgtagatgttgaacgggtcaagctctttacttaacgtttctgatatcccttccagtgcaaatttgctgccacagtaatagctgataccgggcaaggtaatgaagctgcccattgaggtaatattgataatgtggccgcgacggcgctggcgcatgcccggtagcacggctttgatcatcgccaccgcgccaaacacattgacgtcaaactggcggcgcagctctgcaagcggggactcttccagaatgccttcgtggccgtaaccggcattgttcaccagcacatctatcggaccgacggcggactcaatctctccaaccacctcatcaatacgctcaacgtccgtgacatcaagcagatagccaaaagcccgctgcgtatcgagcgcgccgaaagcctgcagtgcttcgctgttgcgcaccgtccctacaacccgatgccctacggcgagggcttcccgcgccagcgcctggccaaagccactgctgacgccggtgattaatatcgtttttgcagatgccataaaaagaactcccatgaaccatgaaggttgcatggtattctctgctctgccgcatttttaggccgtatcttctctttttcttgcctgattttatgaggtggtgggatgtccgacatgattgccctgatgaatagacttgcggtgcaagagggatacaacctcactgccctacctgatgtgcgaattttgcgttccgatcgcccgcttgccagaacgccggtgctttacgatccggggatcgtgattgtctgccagggcagcaaacgcggttatttcggtcaacaaacctatttatatgatgagcagcactacctggcggtttcggtgccggtgccgtttgtgatggaaaccgacgcgtcggcagcacatccgctgctggcgatttatatgcatctggattttcagcttgccgctgaactgatgttgcagattgaacagcatggcgccccgcatcctcccgtcgcaccgcaaagcatgatgtcgagcccgatggacgacagggtaaaaatggccgttcttcgcttacttgacgtcctgaccaacccgcttgaggcggcgatcctcggcccggcgcgggtgcgtgagctttattttcgcgtgctgacaggcgcacagggcaacgcaatgcgtgccgctctggccttgcagggccagtttggcaaaatcggtaaagcgttgcagcacatccatgccgcttacgcggagccgttaacgctgacgcagctggcgatgggggccggcatgagcgtgccgacctttcatagccatttcaaagcgataacgcagatgccgccgatgcagtatgtgaaatcggtacgcctgcaccaggcacggatgctgatggtgcgccaacaaatcaccgccgccgccgcgagttacgccgttggctatgaaagcccatcgcaatttaatcgagaattcaaacgtctgtttggcctaccaccggcagaggagataaaacgcatgcagcgtcacttcgccattccgcccgcgcagcctgcctcggtatttgtttcatcgcactgaggcttatgtggtcaggcgaacgatagtccgcttctggcgccaggcggatcggcacttggggagaaagtccgctatgagcgagagcggacatcaaagtattaaagcaaagaacaacatcttcaggtgataaataaatttgactgaaataacgtacttaccgacccgaaggccggtcattgttaacacggataacggttaccatgcgtaggcttcaggggcttccccacccggtcccggccagatggtatccagtcttttgagcgtatcgcctgaaagggacaacgtcagggcattgagattctgacggagctgttcagctgtgcgcggaccactgagcacagcggtaaccacggggttctgcaacagccaggccaacgccacgtctgagggcgcctcccccagctcatcacacagcgtttcccaggcctccagttgcggccgcaagcgattgatttgtgcctgcagctgcggtgttgcccggcggccatcggcaatttttttcagcacgccacccagcatccccatcccgaccgggctccaggggatcaggccaatgccgtaatggcgcagtgccggaatgacttcaagctcaaccgtgcgctgggtcaggttgtaaaggctctgttccgatgccagccccagcaggttgcgcgcatcagccgtgcactgtgcggtggcaatatcccagccggcaaagttactgctgcccacgtagctgattttaccctcacggatcagctgttccatggcctgccagatttcctcccagggggtgttccggtcgatatggtgcatctggtagagatcgatatggtccgttttcagtcttttcagactggcctcacaggcccggcgaatatggtaagcggacagatatttgtcattcgggcccgtatccatcggctggtaaactttcgtggccagcacgattcggtcacgcaggccactgcgcgccaaccagttaccgatgatttcttcggatgtcccgtacccctttgccatatccggtgactgcggtccgccatagacgtcagcggtatcgaaaaagttgatacccgcatccacggcttcatccatgatcctgaagctggccggctcatccgtcagctcaccgaaattcatggtaccgagaccgatgcggctcacccgcaggccggtacgacccagatgtttatagttcatgtcagatgctccttaactgaacgtgttattgcaggttcttacggaaaaagtctgtcagtttgtcaaaagggatcacgtcggtacgatcatagagatcgacatgccctgcgcccggtacgacataaagctctttaggctgaccggcgcgtttgaatgcatcctcgctgaactcttttgagtgagcccgatcgccggtgataaacagcatcggacgcggtgaaatggtttcaatatcgttgaacggatagaagttcataaacttgccgatactgctcaacatcggtttcgtcgtcagtgcttctttctcacccttcggggtgtaaccaccgcgttcggtgcggtagaaatcgaaaaactcacgctgaatatccggcgttgaagcgtccagtgtattcacggtaccgggaatgtaggccgtctcgcctccctgaaactctgctaaacgctgctctgtggctgaccggataaaggcctttcgttgttccggcgtctgggaatggttgaggccgttgcgaaatgcagcccccatgtcatacatgctgacggtggcaatggctttcatacgcgggtcaatcttggcagcactgataacaaaacttccgctgccgcagatacctaatacaccgatgctatccggatcaacaaacggctgtgtgcttagataatcaaccgccgcgctgaaatcatctgtgtagatttccggtgaaatcaggtgccccggtttgccctcgctttctccccagaaagagagatcgatagccagcgtgacaaacccctgctccgccagcttctgcgcataaagattcgaactctgttccttaacggctcccatcgggtgaccaacgacgatcgccgggtgtcgggtattctggttcatctttttcgggataaacaggttgccgaccacggccatctgatactggtttttaaaggtgactttttgctgcgtcaccttatcgcttttataaaaattatcggccccacgggacatatccgccgcagaggaagcaaatgcactgatcaacagccccagcgctaacgtaaattttttcatgatggtctccttatcattaagccagggtggcgttatccgaatggcagacgccgcagaacgcgaaatcaatctgcacatcacgggcgccggaggcgcgacgggtgatatccatcggctccagcggcagtgtgcccgcatgggcaccgtaagctttacctgtcatgacataactccagggtttatgaatggtctctggcagaagtgtctgcgcgtgaggtcaggaaaatcagcccggccgcgataagcagcatcgtgacgctggccaagaaagtgctctggtagccgtggtgatcgaaaagcagcccccctaccgttgaacctagcgcaatggataactggaccattgccaccatcagcccgccgccggcttcggcattctgcggaaagatacgcggtacccaggcccaccaccccaccggcgcaccggtagaaatcagcccccacaacccgagcagcaccatcacgatggccacctgactgccaaaagcgatcagtgccagcgcggtgatggccatcagcaccggaatggctatcagggtcgagtagaagccgcgtttcagcactctgccaatcagcgtggtgccgatgaaacccgcgacaccgataaccagcaggattagggtgaccactgaagcatccaccttcgtcaccgtttcaaggaaaggcctgatgtaggtaaagagcgtgaactgccccataaagaagatgccgacgcccagcatgcctaacgtgaccactcgacggcgaaacagcgtgaagacattgctggcaccgttactctgccgggtgacctgcatggagggcaggctgaacaactgccagataaacgcggcgatcgcgaccggcaccagacaaaagaaggccccgcgccagccgatcaccgaaccgagccaactgcccaaaggggccgcgatgaccgtggccagtgcattgccgctgttaaaaatggccaacgccagcggaactcggtgcaccggaaccaaacgcatcgccgtggctgccgacatcgaccagaacccgccgactacgatgccaatcagagccctgcccgccatataggtcaggtaattgggtgccatcgcaataacagcaccggaaattgccatcatgcaggtcaggccgagcagcagcgttttccggttaagcgtgcctgccagcacggaaataaacaggctggttaccactgcaaatgccccggaaatggcgatgccctgtccggccatgccttcggtgacacgaagggtctgcgccatcggtgtcagcaggctgaccggcatgaattcggaggcgatcagggcgaagacgcacagcgtcatggcaaagacaccactccagtgcgcaggctgtttcccgcttccggtgtttttttttctgttttcgtctgtcttattactcattcagggatttcttttcagtagataacatgaagtctgtgccccggagccttcagcgctgcaggaagagctgaaacggcatacggagacgggataagggggataatcgcggtacggaaggtgctgcgggtcagttggcgaccctgatctgcaccgcaagaggtccgtggcgctgcaggaccggcagtccggaatccactttccctaacgggatcagtgaacgggcgtaagccctgccctgggcaaaaatcgccaggttgccccagggcgcgtagtaagtgatatctccggcttccggcgtcatgccgtccggtgcctgcaccgtggaaagcctgcgcggcaggtcgcttatacgctcaatatcgtcatagtcttccagcgtcaggctgaggggaagcaaagacgcaaagtcccggcctgtcggcgtatcaaagagggtggcggtggcggtttctccctccacaatgatctcaattttcataagcgtctcctgcgccactccccggtcgttgtcacccgccatagcggactgcgtgacgaaaagcaggccggcaaggagcagcagtgatgttctgcagtaagcgttttgcataagggttagcgttgactttttcatcgcattattgttaccaatatgcagcgggttaactagctaatgaatacttaatacccttataagtaaaatttataaatggaccggaaacgagcatggccagacgcaatctcaacgacttactctctttcgtcaccgtggcgcgtgagggcagctttacgcgcgctgccgcccagctcggcgtgacccagcccgcactgagccaggcgatttccgggctggaagaacggatgcaaatccgcctgctgacgcgaaccacgcgcagcgtgtcagtgaccgccgccggggaacgcctgctgcagtctgtgggccatcgtattgatgagattgaagccgagctggacatgctgacggcactgcgtgataaacctgcggggaccgtccgtattacatgtggacctaatgttctgaagaccacgctgctgccaaagctgacaccactgttacgcgaatatcctgatattcatattgagtttgatgccaaccacgggttccgggatatcgtggcggaccgttttgatgccggcgtgcggctcggagacactatcgacaaagatatgatagccgtacccattggcccgaaactgcgcatggcggctgtagcttcccctgagtattttgcccggtgcgccgcccctcagacgccacgcgatctgatgcaacactgctgtattaatgagcgcatggttcaatcggggaaaatttacgcctgggagtttgagcaggaaaacggtaaatttcacgttcgggttgaagggcaaatgacgtttaacacatcggaacacgtcgttgacgcagctcttgccggactgggcattgcctttttacctgaagaggagttcggcacacatctgcaggaaggaaaactgatccgcgtgcttgaagaatggtgccgtccttttcccggctactatctttattatcccagccgtaaacagccttccccagcgttttcactcgttgtggatgcgttgcgtattaaccggaaaatttaacgctgaattatcgggccaatatttcaagaacggacgtgaacgtccgcttctggcacgcaacggacaggctacgtggtcattgggtctgctttgagcgaggagcggactttagtagaaaaatagaaggcagtatgtagactatcttcttttagtgtttatttgttatggccttatttatgtcttctgaaatgattttcccactcaaagaaactgagcggcgcgcggtaagagttgtcctgattgataagacctgctcgatcctgcttctcagcacacgtgatgtcagtaatcctaacttcataaattcgtgggaattacctggcggtggcattttggagggggaatctcacgcggacgcagccatacgtgaagtgtttgaagaaacgggtttgatagttcctttccaaagcgtccgtgtacctcagtggttcagagatgttcattactcgtatcgcggtgaaaggcgcctgcaacacgaagctatatcccttgcctatataaatgatttcaaacctgatatccattatgcagaacgggaaccttttgaactggaagatcatctcgagtatcactggtggtccctggaggaactaaaatcgtcgtctgcgactttttatccaaggaacttacctaaacacattgagcaactgctccagggggaaagtattaatgatcccattgagatttgggattaactggctgatctgtaatcataattgaagtactttctgccaacattcccgatgtaagcaaaagagttttcaggtttgtcggctaacctgttcaagattgttaacgtccgctactggcacaaaaccgaccgccagagtccccactccagcattccccccccattccacactccagcagcgccagagagaaatcgccctcctgcgttgccgtcggtgtgaacccgcaaagcggcagccaccgccataacgccgacgcttggccccaccagcgaaacccactcttttatctaagaagattcctaacccagctgacggaaatccctccctggcaccaatacgcgggttaacccgccgatttacagcaataatcctgtaaaaacaatcgataagcgaattgttcgcgctcggtaagttacgtctatcctttcgctatgggcgcctgccgcccatcgttcgctgcagatcgcggcatgcgcgtttctggctgttcgggtttcggtttattccatcgcgcgcttccattcatcatgttgaatttcaaagcaatctctcagcaacaaggagtgtttatatggcttacgtcattaccgaccgagaaaaactgcaagcgatttgggaggccgccaaagccggcgactggccggccgtgtatgccgcatccgtcgatgcgctcaccgatcccaaccatgccaaccaacccattgagggcgtggatatcgcggtgtatacctggatcaaaggcgcctatggcgtgaactcgaatcagggggcgtttgcccattacattcgcgaccaaaccaagttgcagtatgagctgcgcaccgggcatgtgcccgatgactgggaggcgcgcattcagaatgcctccgacaacatcgccaaaaacttcgccaaaacgctgtttggcgtcgatctgagcagcgatcccaatgcgccgctgccggatgccccgcccaccagcgccaaagtgccggatattcacgaggttggcctgatcgacgccggcgcggcggcgtccgaagtgttcaccgacgcctcctcgaccggcgcccccaactattccccctgggccggcaccacgctgttctcttatttaggcgatacctcgttctttaccgaatgggtggcgaccaacgacacctcggcctttaaggtggaaggcgggacttacgatctgattgcggcggcgcaggtctccatgcagatgaaaaacctcagttacgtggttgaaacgctgctggcgggcgaagtgcccacctatttgaccaccctcggcattggccacgagaccatccgcctggccgccgaggcggcgcgtgatttctacaccgaatcctacggcagcagcgtgaccggcggcggcagcattatccccggcaagctggacatcggctcggcgattttcaacgacattgccgacgtgctgtccacgccgaatctgtaccgcgtcggtacgctgcatgatgatgatttcacgctggcgttcggcaatatcgccgttaacaccggcagcggcgacgacaccatcagcgtgccgcgcggctggcaaaacaacgccggcaactacggctggacggtgatcgacggcggcagcggccacgatacggtcgattattccagcctgtcgcacggggtaaacctgaagtttgacgcccagggcagctatggcgggcgcggggtaatcgagaaaaacggcatcgggctgtatggctttaaggacgggctgtacaacatcgaagcggtgaaactgaccgactttaaggacaacgtcacctttaacgatcgggtgctaacgccggccaacggtctggaggtcaacctgggcaaaggctccagcgagattcgcttcgagcatggttataccactgcgccgggtgggagtgcgccacaggattatctcggcgtaaacctgagcatgctgtccaacgatgtgcccttccccaacagcctgctgaacattcccgtgaagcagacccacaatatctacatcgacgacagcttcgagctgggctttttacaggcctcctccctgtctatcgataaccacctgctggccttcggcgccgaaggatcaaacagcagcttctcactgaactacaacgcgcaaacccatacgcaggatctatcgatattcatgcagggcgaaagcgcgctcaatcagcacgtcgtcaatatctacaattgggatcaaggatactttggcatcaatctggagcagccggccattcagcttgtcggtttgcaaaccattgccccgcaagagctggcggccgcctaagcgaagcccgccgggtttaccggcgggctgtttacctgcggcgcggctcactccctgtcacgctccgcaatccgcgccatcaacgcccccagcaacgccagatcgaccagcagcgccagcgcgaaacagctccctctcacgcccggcgcggcataggtttgcaccagcgaaacggcaaccactacggccacgagagtcaccaccgtcgtcaaacggtacgccacggcgagtgcgcctttctcccccactgccgtgcggtaggcgacgccctgccccagaccgccgagggcgaggcccggcagcagggccggccagccgtggccgccgaacagcatcagcagcatcaatagccatcccgccgccgccagcaaaaagccgtggcggagaatcgccagcgcaggccggttccgcagcgtccgccagcgggccagcgcggcgccgccgagaaacgccagcgccaatgccgtcagcagcatcagggtagcgccgatgcccagcagattttcggtcttcagcagcaaggcgcccgctgcgaccggcacgctgagcgccagggcgctcgccgccgttcccgtgtgttccatggcgcccagggcgccgttgttgatatagaggctcatcgttcactccgacatgatggaaatgatgaaataaattcatttccctgttcacatgtcagtagcctatctcttgtataatcggtaagacaaactcatagttttcagccttggatgagaataattcagccatgagaaaaacccgtttgccgccgctgggcgcgctgcgcgctttccacgccgtggccgtctgccgcagcttcaaactggccgccgaggcgctgggcgtcagcgcaacggcgatcagccatcagatcaagctgctggagtcggtgctggcatgccgggtgtgcgagcgcagcgcgcagggcgtcagcctgaccgaaaccggcgagatcctgtatgccggcacccagcgcgccttcgccgcgctggagcagtccgtcgcccaaatcacccgcgcccggcagccgccggcgctgaccgtcaccaccacctccaactttctcacccactggctggtgccgcgcctggcggatttcaaggcggagtttcccgccatcgatctgcgcctgcacaccagcgtcgagcgggtggatctcagccagcgcaccgtggacgtcgccatccgctaccgtgaaacgccggaaagcgatctgcactgcaccctgctgcatgaggatcgctttatcgtggtggccagcccggcgctggcgctggagcacatcgaagatttgctgcgggtgacgctgtttcacgtggagcatcggcaggtgcccgccgactcaccgacctgggagaactggcggcggcgctacgggccggaaggattgaacgtggaagccgggctgaccttcagcgacgagacccatgcgctgcaggcggcggtggcgggccagggggtggtgatcgccagccggctgctggcgcgcgatttgttgcagcgtggcgttctggcggcgccgttcgagatgtcattgcccggcgccaactactatctggtggccaccgaagagaccgcgcagcgccccgatatcatggcgctgcgcgcgtggctgctgcggcaaatggcggcgggctaacggctatcgggggcgatttcgcccaggcggatcgccacgctgatcgcctgcgcggtggtggcggcgccgagacgttggcgaatgcgccgcaggtggttttccaccgtgcgttcagacaggccgagcatcgcggcgatatccgcctgccgccggccaatggcggtccagctcagcacctcgcgctcgcgcgccgacagccggccctcccgttcaccggcagcaggttcgaacagccgccgcgccgccagaaaagccgccgcgcccaccagcgacagcgccagccgcaccggcggcgaggcgtcgatgcgctcgccccccaggctgaccgccccctccaacccggcggggccgaataccgggatctgtacgccgtgcagaccggcgccgcgcggcgtgcgcacaatccggtagcgctcgccctgctgcgcccgggttttggtccagaagaacggttctgcggcccgcagcatgtgccgggtcaccgggcagtgccgcacgtaggtcagcgcgtcgaccgcctccccctcaccgaaccagtcgccctcgacccagtagatatgctcgatccccgcctccgccgccgcggaggcggaaaacagcacaaagcggttgaaaccgaacggcgcggcgaagacgcgaacccgcccctgaatggcggacaaggtgcgctcgtggtccatcgccaacgccgtctggaaagcgcgctgcgcgatctcgtcgctcatcgcgcggcgacgtcggccagcagcgtttctgccgccagtttgccgaggttgttggaagccagcgggctgtcgccggtcagcaggcgccgatctttatgcaccttgccggtgatgtcggcgttgacgatcttaacgcccaactcgcgcaggcgttcgcctaccagccagggcatcgggccggggatatagccgatatcgatgttggcgccggtatcgagcgagtccgggaacacgcacatctcatagccgcgatagaggaaatccgctttgctctcgccgatgcccgccgccagcaaaccggccggcccgtggcacagcgaaatcacgtagcgatcgtggtcatgcgcccagtgcagcgtctttttcacctcttcactgaacgggatatcgttgagcacgccgtggccgccgggaatgaaaacgccgaggtagttgccgccatccagatccttcaccacttccgtcagctttttcggctgcttgagttggctgcggtacttctcgtaggtggccttgaccgcttcatcttcatgcgggaacgcccacatctccagcttcaccggatcgccggacggcgtagcgacgtcgatctcgaaaccggccagatccaggtgatacatcggcagcagcatctcgaccgggtgattgccggtggagaagaacttgccgttttgcatcagcaggtagcgctcctgcgaggcgatcatcagcaccttccacttgccgccgcgataggcgttcgggtaactggcgcccgtgaagtcggttttggacgaggtgtactggctgagggagtaaggggatgggaagaacgcgttgtcttccgccacatccggggtgggattacgatcgttggacactgaatcagtcatgattatctccatattcatcgttgcattgcccattcagcttaaataaccgccggcagggccgcaatgagggatatccctcaagcagcgcccaggcggcggagcgtccccctgggcgctgttcttagctgttcacaaacgccagcagatcggcgttgacctgatcggcgtgggtggtcgggatgccgtgcggcgcgcccttataggtatgcagcgtgccgttttgcaccagcttggccgacagcacgccggaatcctgataaggcaccacctgatcgtcgtcgccgtggatcaccagcaccggaatggagatcttcttgagatcttcggtgaaatcggtctgcgagaaggcgacgatgccgtcatagtgcgccttggcgccgcccatcatgccctggcgccaccagttccagataatggcctccgacggtttggcgcccggacggttatagccgtagaacggaccggccggcacgtcgtaatagaattgcgcccggttggcggccagctgcgcctggaaatcatcgaacaccgctttgggggtgccctgcggattggcgtcggttttcaccatcagcggcggcaccgcgctgatcagcaccgctttggacaccttgtcctcgccgtggcgcacgatatagcgcactacctcgccgccgcccgtcgagtggcccacgtgcatcgcgccctgtacgcccaggtgtttcaccaccgcggcgacatcatcggcgtagtggtccatgtcgtgcccttcccacacctggctggagcggccgtggccgcggcgatcgtgcgcaaccacgcggaacccttggttcacgaagaacagcatctgggcatcccagtcatcgctggacagcggccagccgtggtggaagtagataaccttgccgtttttggggccccaatccttgtagaaaatctcgacgccatcgctggtcgttacataacccatgtcgtttctcccatttacactatggttaaaaaagaaggtttatactgcgcgcggcgccgggatctctggctccctcatcccggctggccgacgatcttgcgttgatcgtttaacgagtataggtttaaagctcactttaaggtcaaacccaattcggcaaaccgcattcccgctttcgatcggcatcaggagtattcaagtgcaaggagatgacaccgccacgacgatggagcaacggcttgccgcccagcgccacgccttcctgcgcgacggcgcgccgacgatggatcagcgcaaggccgtcctgcgccgcctgcggagcgccattctggcccagcgcggcgcgctggcggcggccgtcagcgcggacttcggccaccgctcgccttacgagaccgacattttggagattctggtcaccgtgcaggcgatcgattacctgctgcgcaacctgaaacgcttcatgaaaccggagcgccgccacgttgccctgccgtaccaggctgcgcgcgcctatgtgcaatatcagcccaagggcgtgatcggcgtcatggcgccgtggaactaccctttatcgttgaccttcatcccgctggccaccgccctggccgccggcaaccgcgtgatgctgaaaccttcggagctcacgccgcataccagccagctcatcgagacgatgctggcggcgcagtttcccgccgacgagatcgccgtggtgaccggcgggccggagatcggagccagattcagcgagctggcgttcgaccatctggtgttcaccggcagtacggcgatcggccgtcaggtcatgcaggcggccgctaaaaatctggtgccgctgacgctcgagttgggcggcaaaagccctgccgtcgtggcgcccggcgcgctcaccgccagaatcgttaacagcctggcgttcggcaagctgtcgaacgcgggccaaacctgcatcgcgcccgattacctgctgatccatcagaacgatgtggagagcttcattgcgctctacgacgcggcggtcaaagcgttttaccccacagggccgacgggcagcgactacggcgccatcatcagcgacaggcactatcaacgtttgcaagacctgctggccgatgcccaggcgcggggcgcgcaaatcattccggtcggccatcgcccggactcggcgtctgaacggccgaaaaccctggctcccacgctgatcgtcggcgcccccgacgacagccggatcatgcaagaagagatcttcgggccgctgctgccggtgcgcacctacgccgcctttgatgaaacgatcgacgttatcaacgccgggccgcgcccgctggcgctgtattactttggcccggcaggcgcgcagcaggatcggctgctgacgcacaccacctcaggcaacgtcagcgtcaacgccaccctgctgcatttcgcccaggacgatctgccgttcggcggcatcggccccagcggcatgggggcctgtcacggcatcgaaggatttcgggcgctgagccacgccaagggcgttttcatccagagccgctggcactttaccggcctgctgcgcacgccgttcggcaaactggcggacgcggtgctcacgttcatgttgcggcgccgataaagcggtgtgctgacaatcaatagcacagccatgaatcgccgcaagctatcacaatattcactcattcctattttatctctccgccgccgctgactaagcttagccatgagtcaccctttgtccgttggcgacgggggtgacgtaaatcgattgagttcagttatttagcgcaacacccgacgcaagccttacccgcatgccttgttaaccgctccacgcccggcggctggagcatctttacggaagcagagagcgcattatgacaactgaaagcaaatgcccgttttcgggcggcaagcagcccgcaccgcagaacggccccaccaatcaggattggtggcctaatcagctcagcctgaaaccgctgcatcagcactcccccctgtccgatccgatggataaagacttcaactacgccgatgccttcaacagcctcgatctggcggcggtcaaacaggatctgcacgccctgatgaccgattcgcaggaatggtggccggcggacttcggccactacggcggcctgttcatccgcatggcctggcacagcgccggcacttaccgcatcggcgacggccgcggcggcgcgggcgaaggccaacagcgcttcgccccgctcaacagctggccggacaacgtcagtctcgacaaggcgcgccgcctgctgtggccaatcaagcagaaatacggccgcaacatctcctgggccgatctgattatcctgaccggcaacgtggcgctggaatcgatgggcttcaaaaccttcggctacgccggcggccgcgccgacacctgggagccggacgacgtctactgggggtctgagaagatctggctggaactgagcggcgggccgaacagccgctactcgggcgaccgcgatctggaaaacccgctggcggcggtgcagatgggcctgatctacgtcaacccggaaggcccggacggcaaccccgatccggtggccgccgcgcgcgacatccgtgaaaccttcgcccgcatggcgatgaacgacgaagaaaccgtggcgctgatcgccggcggccacaccttcggcaagacccacggcgccggcccggcgtctcacgtcggcgccgatccggaagcggccggactggagtcgcagggcctcggctggcacagcaccttcggcaccggcgtcggcaaagacgccatcaccagcggcctggaagtgacctggaccaccaccccgacccagtggaaccatgacttcttccgccacctgttcgaatacgaatgggagctgagccaaagcccggccggcgcgcaccagtgggtggcgaaagacatcggcgaaaccattcccgacgccttcgacccgaacaagaagcgccgcccgaccatgctgaccaccgacctgtcgctgcgcttcgatccggcctacgagaagatttcgcgccgcttctatgaacacccggaagagctggccgacgccttcgcccgcgcctggttcaagctgacccaccgcgatatggggccgcgcgcgcgctacctcggcccggaagtgccgcaggaagagctgatttggcaggatccgatcccggcggtcgatcatccgctgatcgacgagcaggacgtcgccgcgctgaaaagcaaggtgctggcttccggcctgccggtgtccgcgctggtttccaccgcctgggcttccgcatcgagcttccgcggttccgataaacgcggcggcgccaacggcgcgcgcattcgcctggcgccgcagaaggactgggccgtcaaccaacctgcgcagctcgccgcgacgttggccaagctggagagcatccaacgcgccttcaacgacgcgcagaccggcggcaagcgcgtctcgctggcggatctgatcgtgctggccggcgcggcgggcgtggaacaggcggcgaagaacgccggcttgaccctgacggtgccgttcgccccaggccgcatggacgcctcgcaggaacagaccgacgtggactccttcgaggcgatggagccgctcgccgacggtttccgcaacttcctgaagggcaaataccgcgtgccggccgaaacgctgctggtcgacaaggcgcagctgttgaccctgaccgcgccggaaatgacggtgctggttggcgggctgcgggtgctcggcgccaacgtcggcggcacgcagcacggcgtgttcacccatcgcccgcaggcgctgaccaacgacttcttcgtcaacctgctcgacatgggcaccacctggcacccggtgggtgaggacggcctgttcgaaggccgcgatcgccgcagcggcgcggtcaaatggaccggcacccgcgtcgatctggtgttcggttcgcacgcgcagctgcgcgcgctggccgaagtctacggcagcgccgacgggcaagagaagttcgcccatgacttcgtcgccgcctggaacaaagtgatgaacctcgatcgcttcgatctggcgtaaactccccgcaacggtctgcttcggcaggccgtttttcctcccgagaaccacaccgcctccgctcagcgccagccgtagcgcacgtcgttatatttcttttcccgcttattcgtatttactcaacaagtcatataaaaatttgatgggcggcaattcttttaatgctgtatttatatttagagggcaatgaagaacgtaaattcagcgcgctaatacgatatatcccatcaaggagaacaccgttatggattatccccaattcacttcaacacgcggcgaggcggaccgcattatcagcgccgacccttagcgatagcgggcctgctggcccggtgcctcaccgtttacgccaataagaataaatgttctgcccctgcgccatattcgccggggcgtcagaacttcgcccttatttagcgtttcatcacgcgcgttgcgtttttagcttttatttttcagccgacgggaaagctcataggaaattacgctgcactcaggaaaataaccgctacctggaggtcatcatgcaacacattatcggtatttcttctcgtcggctgaggatatcggcccttgcgctgctgctccctgccgtatcatgggcggccgatacggcatctctcgccgtggggccgcaatatgacaccacccatgtctacgtcgaacgcggcaagatggatgcctttgtcgacagcatcctgaaaaccttcggtggcacccgcaccgaacgcgtgctggtcaacgtcacgccgacgccgagcgaaacctattcccagctgatactgacgccggccggcagcttctcggtgttcgatttcaaaacgccgatcccgtacccgttcggcgtcgaacgcaacggttttctggtcagggatatggacgccgctatccggcaggccagggccgccggcgccgatgtgctggtcgcccccttcgacgatccgattgggcgcgacgcggtgatccaatggcccggcggcgtcaacatgcagctttattggcacaccaaggcgcccaactacaagccgctgctgagcgtgccggaaaaccgcctgtatctctccgcttaccgcgtcgatgatttcctgaaaagctatcagacgttctcgcacggcaaagtcgtgcgcgacgagcaggtcagcgatgcggcgatcggccgcaacgataacggcaagatccgccagatcgaactggactcgcgttttggcaaaacgcgcattttcgtcaccgatgggcatctgccttatccgttcggccatgagcgcaccggctatggcgtcgaggatctgcaggccacgctggccaaagcgacagccagcggcgcgcaggtgctgtggcgttcgacggcggcggaacgccgcgcctcggcgctggtgcgtttccccggcggctacatcgccgaaattcaccagacagccaaataaacccaaggcgcgctgcggcgcgcttttttcttcggatattcatgatgaaacgcacgctacccgcactgttgctgttctccacgctccccgctctggcggcggagcccgccgcctccccctggaaaaacatcccgttgggtgatgcggccaccttatctttcgacggttcactgcgcgagcgctatgaatggacggatcaacgggatttgaatggcggacgcgacgacactttcatgcagcgcttgctggttggcgcgcgcctcgactacggcgactatttcggcgcctatgtgcaagtgggatcgtcgctggccgcgccgcgcgatcgcgggcgcaagccgaccgacgaagatcatgcctacctcgggcagggctatgtggatatgaaactgcccactgcctatggcctcggcaccctgcgggtcgg
